United States Patent Application Publication US 2009/0215046 A1 - sequence listing, part 2

SEQ ID NO: 1015 - DNA, 2616 bp, Homo sapiens
ctccctctgcggcgggggcggccccagcggatgaatgaagcggcgcgtggctgccggggaggccagagcgtggagcgctgcgcggcgcggcggccgggccctcgagacggggacggacacaccagcccctcggataccacttggccactcccgctgaggccactcccactgcgtggctgaagcctcgaggtcaccaggcggaggcgcggagatgcccctgcatcagctgggggacaagccgctcaccttccccagccccaactcagccatggaaaacgggcttgaccacaccccacccagcaggagggcatccccgggcacacccctgagccccggctccctccgctccgctgcccatagccccctggacaccagcaagcagcccctctgccagctctgggccgagaagcatggcgcccgggggacccatgaggtgcggtacgtctcggccgggcagagcgtggcgtgcggctggtgggccttcgcaccgccgtgcctgcaggtcctcaacacgcccaagggcatcctgttcttcctgtgtgcggccgcattcctgcaggggatgactgtgaatggcttcatcaacacagtcatcacctccctggagcgccgctatgacctgcacagctaccagagcgggctcatcgccagctcctacgacattgccgcctgcctctgcctcaccttcgtcagctacttcgggggctcagggcacaagccgcgctggctgggctggggcgtgctgcttatgggcacggggtcgctggtgttcgcgctgccccacttcacggctggccgctatgaggtggagttggacgcgggtgtcaggacgtgccctgccaaccccggcgcggtgtgtgcggacagcacctcgggcctgtcccgctaccagctggtcttcatgctgggccagttcctgcatggcgtgggtgccacacccctctacacgctgggcgtcacctacctggatgagaacgtcaagtccagctgctcgcccgtctacattgccatcttctacacagcggccatcctgggcccagctgccggctacctgattggaggtgccctgctgaatatctacacggaaatgggccgacggacggagctgaccaccgagagcccactgtgggtcggcgcctggtgggtcggcttcctgggctctggggccgctgctttcttcaccgccgttcccatccttggttaccctcggcagctgccaggctcccagcgctacgcggtcatgagagcggcggaaatgcaccagttgaaggacagcagccgtggggaggcgagcaacccggactttgggaaaaccatcagagacctgcctctctccatctggctcctgctgaagaaccccacgttcatcctgctctgcctggccggggccaccgaggccactctcatcaccggcatgtccacgttcagccccaagttcttggagtcccagttcagcctgagtgcctcagaagctgccaccttgtttgggtacctggtggtgccagcgggtggtggcggcaccttcctgggcggcttctttgtgaacaagctcaggctccggggctccgcggtcatcaagttctgcctgttctgcaccgttgtcagcctgctgggcatcctcgtcttctcactgcactgccccagtgtgcccatggcgggcgtcacagccagctacggcgggagcctcctgcccgaaggccacctgaacctaacggctccctgcaacgctgcctgcagctgccagccagaacactacagccctgtgtgcggctcggacggcctcatgtacttctcactgtgccacgcagggtgccctgcagccacggagacgaatgtggacggccagaagatgtgtccgtgaccctcagagatcctttgccctgggaatccagtggattgtagttagaatactagggggcatcccggggcccatcgccttcggctgggtgatcgacaaggcctgtctgctgtggcaggaccagtgtggccagcagggctcctgcttggtgtaccagaattcggccatgagccgctacatactcatcatggggctcctgtacaaggtgctgggcgtcctcttctttgccatagcctgcttcttatacaagcccctgtcggagtcttcagatggcctggaaacttgtctgcccagccagtcctcagcccctgacagtgccacagatagccagctccagagcagcgtctgaccaccgcccgcgcccacccggccacggcgggcactcagcatttcctgatgacagaacagtgccgttgggtgatgcaatcacacgggaacttctatttgacctgcaaccttctacttaacctgtggtttaaagtcggctgtgacctcctgtccccagagctgtacggccctgcagtgggtgggaggaacttgcataaatatatatttatggacacacagtttgcatcagaacgtgtttatagaatgtgttttatacccgatcgtgtgtggtgtgcgtgaggacaaactccgcaggggctgtgaatcccactgggagggcggcgggcctgcagcccgaggaaggcttgtgtgtcctcagttaaaactgtgcatatcgaaatatattttgttatttaagcctgcgtccccgt

SEQ ID NO: 1016 - DNA, 2646 bp, Homo sapiens
ctccctctgcggcgggggcggccccagcggatgaatgaagcggcgcgtggctgccggggaggccagagcgtggagcgctgcgcggcgcggcggccgggccctcgagacggggacggacacaccagcccctcggataccacttggccactcccgctgaggccactcccactgcgtggctgaagcctcgaggtcaccaggcggaggcgcggagatgcccctgcatcagctgggggacaagccgctcaccttccccagccccaactcagccatggaaaacgggcttgaccacaccccacccagcaggagggcatccccgggcacacccctgagccccggctccctccgctccgctgcccatagccccctggacaccagcaagcagcccctctgccagctctgggccgagaagcatggcgcccgggggacccatgaggtgcggtacgtctcggccgggcagagcgtggcgtgcggctggtgggccttcgcaccgccgtgcctgcaggtcctcaacacgcccaagggcatcctgttcttcctgtgtgcggccgcattcctgcaggggatgactgtgaatggcttcatcaacacagtcatcacctccctggagcgccgctatgacctgcacagctaccagagcgggctcatcgccagctcctacgacattgccgcctgcctctgcctcaccttcgtcagctacttcgggggctcagggcacaagccgcgctggctgggctggggcgtgctgcttatgggcacggggtcgctggtgttcgcgctgccccacttcacggctggccgctatgaggtggagttggacgcgggtgtcaggacgtgccctgccaaccccggcgcggtgtgtgcggacagcacctcgggcctgtcccgctaccagctggtcttcatgctgggccagttcctgcatggcgtgggtgccacacccctctacacgctgggcgtcacctacctggatgagaacgtcaagtccagctgctcgcccgtctacattgccatcttctacacagcggccatcctgggcccagctgccggctacctgattggaggtgccctgctgaatatctacacggaaatgggccgacggacggagctgaccaccgagagcccactgtgggtcggcgcctggtgggtcggcttcctgggctctggggccgctgctttcttcaccgccgttcccatccttggttaccctcggcagctgccaggctcccagcgctacgcggtcatgagagcggcggaaatgcaccagttgaaggacagcagccgtggggaggcgagcaacccggactttgggaaaaccatcagagacctgcctctctccatctggctcctgctgaagaaccccacgttcatcctgctctgcctggccggggccaccgaggccactctcatcaccggcatgtccacgttcagccccaagttcttggagtcccagttcagcctgagtgcctcagaagctgccaccttgtttgggtacctggtggtgccagcgggtggtggcggcaccttcctgggcggcttctttgtgaacaagctcaggctccggggctccgcggtcatcaagttctgcctgttctgcaccgttgtcagcctgctgggcatcctcgtcttctcactgcactgccccagtgtgcccatggcgggcgtcacagccagctacggcgggagcctcctgcccgaaggccacctgaacctaacggctccctgcaacgctgcctgcagctgccagccagaacactacagccctgtgtgcggctcggacggcctcatgtacttctcactgtgccacgcagggtgccctgcagccacggagacgaatgtggacggccagaagcagcattcctgcactaacggcaactctacgatgtgtccgtgaccctcagagatcctttgccctgggaatccagtggattgtagttagaatactagggggcatcccggggcccatcgccttcggctgggtgatcgacaaggcctgtctgctgtggcaggaccagtgtggccagcagggctcctgcttggtgtaccagaattcggccatgagccgctacatactcatcatggggctcctgtacaaggtgctgggcgtcctcttctttgccatagcctgcttcttatacaagcccctgtcggagtcttcagatggcctggaaacttgtctgcccagccagtcctcagcccctgacagtgccacagatagccagctccagagcagcgtctgaccaccgcccgcgcccacccggccacggcgggcactcagcatttcctgatgacagaacagtgccgttgggtgatgcaatcacacgggaacttctatttgacctgcaaccttctacttaacctgtggtttaaagtcggctgtgacctcctgtccccagagctgtacggccctgcagtgggtgggaggaacttgcataaatatatatttatggacacacagtttgcatcagaacgtgtttatagaatgtgttttatacccgatcgtgtgtggtgtgcgtgaggacaaactccgcaggggctgtgaatcccactgggagggcggcgggcctgcagcccgaggaaggcttgtgtgtcctcagttaaaactgtgcatatcgaaatatattttgttatttaagcctgcgtccccgt

SEQ ID NO: 1017 - DNA, 2959 bp, Homo sapiens
ctccctctgcggcgggggcggccccagcggatgaatgaagcggcgcgtggctgccggggaggccagagcgtggagcgctgcgcggcgcggcggccgggccctcgagacggggacggacacaccagcccctcggataccacttggccactcccgctgaggccactcccactgcgtggctgaagcctcgaggtcaccaggcggaggcgcggagatgcccctgcatcagctgggggacaagccgctcaccttccccagccccaactcagccatggaaaacgggcttgaccacaccccacccagcaggagggcatccccgggcacacccctgagccccggctccctccgctccgctgcccatagccccctggacaccagcaagcagcccctctgccagctctgggccgagaagcatggcgcccgggggacccatgaggtgcggtacgtctcggccgggcagagcgtggcgtgcggctggtgggccttcgcaccgccgtgcctgcaggtcctcaacacgcccaagggcatcctgttcttcctgtgtgcggccgcattcctgcaggggatgactgtgaatggcttcatcaacacagtcatcacctccctggagcgccgctatgacctgcacagctaccagagcgggctcatcgccagctcctacgacattgccgcctgcctctgcctcaccttcgtcagctacttcgggggctcagggcacaagccgcgctggctgggctggggcgtgctgcttatgggcacggggtcgctggtgttcgcgctgccccacttcacggctggccgctatgaggtggagttggacgcgggtgtcaggacgtgccctgccaaccccggcgcggtgtgtgcggacagcacctcgggcctgtcccgctaccagctggtcttcatgctgggccagttcctgcatggcgtgggtgccacacccctctacacgctgggcgtcacctacctggatgagaacgtcaagtccagctgctcgcccgtctacattgccatcttctacacagcggccatcctgggcccagctgccggctacctgattggaggtgccctgctgaatatctacacggaaatgggccgacggacggagctgaccaccgagagcccactgtgggtcggcgcctggtgggtcggcttcctgggctctggggccgctgctttcttcaccgccgttcccatccttggttaccctcggcagctgccaggctcccagcgctacgcggtcatgagagcggcggaaatgcaccagttgaaggacagcagccgtggggaggcgagcaacccggactttgggaaaaccatcagagacctgcctctctccatctggctcctgctgaagaaccccacgttcatcctgctctgcctggccggggccaccgaggccactctcatcaccggcatgtccacgttcagccccaagttcttggagtcccagttcagcctgagtgcctcagaagctgccaccttgtttgggtacctggtggtgccagcgggtggtggcggcaccttcctgggcggcttctttgtgaacaagctcaggctccggggctccgcggtcatcaagttctgcctgttctgcaccgttgtcagcctgctgggcatcctcgtcttctcactgcactgccccagtgtgcccatggcgggcgtcacagccagctacggcgggagcctcctgcccgaaggccacctgaacctaacggctccctgcaacgctgcctgcagctgccagccagaacactacagccctgtgtgcggctcggacggcctcatgtacttctcactgtgccacgcagggtgccctgcagccacggagacgaatgtggacggccagaaggtgtaccgagactgtagctgtatccctcagaatctttcctctggttttggccatgccactgcagggaaatgcacttcaacttgtcagagaaagcccctccttctggttttcatattcgttgtaattttctttacattcctcagcagcattcctgcactaacggcaactctacgatgtgtccgtgaccctcagagatcctttgccctgggaatccagtggattgtagttagaatactagggggcatcccggggcccatcgccttcggctgggtgatcgacaaggcctgtctgctgtggcaggaccagtgtggccagcagggctcctgcttggtgtaccagaattcggccatgagccgctacatactcatcatggggctcctgtacaagtttcagttaccagaggtccaccacagtctgaatgtattaaataggaaattccagaagcaaacagttcataacctttaaagcacgcgccgttctgcacagtctggtgagatcttgatctgtcctgcccaggactcggattctccctttgtccaactttggaagaaggcaaggtgctgggcgtcctcttctttgccatagcctgcttcttatacaagcccctgtcggagtcttcagatggcctggaaacttgtctgcccagccagtcctcagcccctgacagtgccacagatagccagctccagagcagcgtctgaccaccgcccgcgcccacccggccacggcgggcactcagcatttcctgatgacagaacagtgccgttgggtgatgcaatcacacgggaacttctatttgacctgcaaccttctacttaacctgtggtttaaagtcggctgtgacctcctgtccccagagctgtacggccctgcagtgggtgggaggaacttgcataaatatatatttatggacacacagtttgcatcagaacgtgtttatagaatgtgttttatacccgatcgtgtgtggtgtgcgtgaggacaaactccgcaggggctgtgaatcccactgggagggcggcgggcctgcagcccgaggaaggcttgtgtgtcctcagttaaaactgtgcatatcgaaatatattttgttatttaagcctgcgtccccgt

SEQ ID NO: 1018 - DNA, 2929 bp, Homo sapiens
ctccctctgcggcgggggcggccccagcggatgaatgaagcggcgcgtggctgccggggaggccagagcgtggagcgctgcgcggcgcggcggccgggccctcgagacggggacggacacaccagcccctcggataccacttggccactcccgctgaggccactcccactgcgtggctgaagcctcgaggtcaccaggcggaggcgcggagatgcccctgcatcagctgggggacaagccgctcaccttccccagccccaactcagccatggaaaacgggcttgaccacaccccacccagcaggagggcatccccgggcacacccctgagccccggctccctccgctccgctgcccatagccccctggacaccagcaagcagcccctctgccagctctgggccgagaagcatggcgcccgggggacccatgaggtgcggtacgtctcggccgggcagagcgtggcgtgcggctggtgggccttcgcaccgccgtgcctgcaggtcctcaacacgcccaagggcatcctgttcttcctgtgtgcggccgcattcctgcaggggatgactgtgaatggcttcatcaacacagtcatcacctccctggagcgccgctatgacctgcacagctaccagagcgggctcatcgccagctcctacgacattgccgcctgcctctgcctcaccttcgtcagctacttcgggggctcagggcacaagccgcgctggctgggctggggcgtgctgcttatgggcacggggtcgctggtgttcgcgctgccccacttcacggctggccgctatgaggtggagttggacgcgggtgtcaggacgtgccctgccaaccccggcgcggtgtgtgcggacagcacctcgggcctgtcccgctaccagctggtcttcatgctgggccagttcctgcatggcgtgggtgccacacccctctacacgctgggcgtcacctacctggatgagaacgtcaagtccagctgctcgcccgtctacattgccatcttctacacagcggccatcctgggcccagctgccggctacctgattggaggtgccctgctgaatatctacacggaaatgggccgacggacggagctgaccaccgagagcccactgtgggtcggcgcctggtgggtcggcttcctgggctctggggccgctgctttcttcaccgccgttcccatccttggttaccctcggcagctgccaggctcccagcgctacgcggtcatgagagcggcggaaatgcaccagttgaaggacagcagccgtggggaggcgagcaacccggactttgggaaaaccatcagagacctgcctctctccatctggctcctgctgaagaaccccacgttcatcctgctctgcctggccggggccaccgaggccactctcatcaccggcatgtccacgttcagccccaagttcttggagtcccagttcagcctgagtgcctcagaagctgccaccttgtttgggtacctggtggtgccagcgggtggtggcggcaccttcctgggcggcttctttgtgaacaagctcaggctccggggctccgcggtcatcaagttctgcctgttctgcaccgttgtcagcctgctgggcatcctcgtcttctcactgcactgccccagtgtgcccatggcgggcgtcacagccagctacggcgggagcctcctgcccgaaggccacctgaacctaacggctccctgcaacgctgcctgcagctgccagccagaacactacagccctgtgtgcggctcggacggcctcatgtacttctcactgtgccacgcagggtgccctgcagccacggagacgaatgtggacggccagaaggtgtaccgagactgtagctgtatccctcagaatctttcctctggttttggccatgccactgcagggaaatgcacttcaacttgtcagagaaagcccctccttctggttttcatattcgttgtaattttctttacattcctcagcagcattcctgcactaacggcaactctacgatgtgtccgtgaccctcagagatcctttgccctgggaatccagtggattgtagttagaatactagggggcatcccggggcccatcgccttcggctgggtgatcgacaaggcctgtctgctgtggcaggaccagtgtggccagcagggctcctgcttggtgtaccagaattcggccatgagccgctacatactcatcatggggctcctgtacaagacgataaagcacaaagccttctaaataaaatgcggtcccacggccagctgttcagaggatcttgacgctcttccttgggtgacggacccaggagagttcatcctgcaggaacccgtggcctcaggctttccaggagggaggtgctgggcgtcctcttctttgccatagcctgcttcttatacaagcccctgtcggagtcttcagatggcctggaaacttgtctgcccagccagtcctcagcccctgacagtgccacagatagccagctccagagcagcgtctgaccaccgcccgcgcccacccggccacggcgggcactcagcatttcctgatgacagaacagtgccgttgggtgatgcaatcacacgggaacttctatttgacctgcaaccttctacttaacctgtggtttaaagtcggctgtgacctcctgtccccagagctgtacggccctgcagtgggtgggaggaacttgcataaatatatatttatggacacacagtttgcatcagaacgtgtttatagaatgtgttttatacccgatcgtgtgtggtgtgcgtgaggacaaactccgcaggggctgtgaatcccactgggagggcggcgggcctgcagcccgaggaaggcttgtgtgtcctcagttaaaactgtgcatatcgaaatatattttgttatttaagcctgcgtccccgt

SEQ ID NO: 1019 - DNA, 2786 bp, Homo sapiens
ctccctctgcggcgggggcggccccagcggatgaatgaagcggcgcgtggctgccggggaggccagagcgtggagcgctgcgcggcgcggcggccgggccctcgagacggggacggacacaccagcccctcggataccacttggccactcccgctgaggccactcccactgcgtggctgaagcctcgaggtcaccaggcggaggcgcggagatgcccctgcatcagctgggggacaagccgctcaccttccccagccccaactcagccatggaaaacgggcttgaccacaccccacccagcaggagggcatccccgggcacacccctgagccccggctccctccgctccgctgcccatagccccctggacaccagcaagcagcccctctgccagctctgggccgagaagcatggcgcccgggggacccatgaggtgcggtacgtctcggccgggcagagcgtggcgtgcggctggtgggccttcgcaccgccgtgcctgcaggtcctcaacacgcccaagggcatcctgttcttcctgtgtgcggccgcattcctgcaggggatgactgtgaatggcttcatcaacacagtcatcacctccctggagcgccgctatgacctgcacagctaccagagcgggctcatcgccagctcctacgacattgccgcctgcctctgcctcaccttcgtcagctacttcgggggctcagggcacaagccgcgctggctgggctggggcgtgctgcttatgggcacggggtcgctggtgttcgcgctgccccacttcacggctggccgctatgaggtggagttggacgcgggtgtcaggacgtgccctgccaaccccggcgcggtgtgtgcggacagcacctcgggcctgtcccgctaccagctggtcttcatgctgggccagttcctgcatggcgtgggtgccacacccctctacacgctgggcgtcacctacctggatgagaacgtcaagtccagctgctcgcccgtctacattgccatcttctacacagcggccatcctgggcccagctgccggctacctgattggaggtgccctgctgaatatctacacggaaatgggccgacggacggagctgaccaccgagagcccactgtgggtcggcgcctggtgggtcggcttcctgggctctggggccgctgctttcttcaccgccgttcccatccttggttaccctcggcagctgccaggctcccagcgctacgcggtcatgagagcggcggaaatgcaccagttgaaggacagcagccgtggggaggcgagcaacccggactttgggaaaaccatcagagacctgcctctctccatctggctcctgctgaagaaccccacgttcatcctgctctgcctggccggggccaccgaggccactctcatcaccggcatgtccacgttcagccccaagttcttggagtcccagttcagcctgagtgcctcagaagctgccaccttgtttgggtacctggtggtgccagcgggtggtggcggcaccttcctgggcggcttctttgtgaacaagctcaggctccggggctccgcggtcatcaagttctgcctgttctgcaccgttgtcagcctgctgggcatcctcgtcttctcactgcactgccccagtgtgcccatggcgggcgtcacagccagctacggcgggagcctcctgcccgaaggccacctgaacctaacggctccctgcaacgctgcctgcagctgccagccagaacactacagccctgtgtgcggctcggacggcctcatgtacttctcactgtgccacgcagggtgccctgcagccacggagacgaatgtggacggccagaagatgtgtccgtgaccctcagagatcctttgccctgggaatccagtggattgtagttagaatactagggggcatcccggggcccatcgccttcggctgggtgatcgacaaggcctgtctgctgtggcaggaccagtgtggccagcagggctcctgcttggtgtaccagaattcggccatgagccgctacatactcatcatggggctcctgtacaagtttcagttaccagaggtccaccacagtctgaatgtattaaataggaaattccagaagcaaacagttcataacctttaaagcacgcgccgttctgcacagtctggtgagatcttgatctgtcctgcccaggactcggattctccctttgtccaactttggaagaaggcaaggtgctgggcgtcctcttctttgccatagcctgcttcttatacaagcccctgtcggagtcttcagatggcctggaaacttgtctgcccagccagtcctcagcccctgacagtgccacagatagccagctccagagcagcgtctgaccaccgcccgcgcccacccggccacggcgggcactcagcatttcctgatgacagaacagtgccgttgggtgatgcaatcacacgggaacttctatttgacctgcaaccttctacttaacctgtggtttaaagtcggctgtgacctcctgtccccagagctgtacggccctgcagtgggtgggaggaacttgcataaatatatatttatggacacacagtttgcatcagaacgtgtttatagaatgtgttttatacccgatcgtgtgtggtgtgcgtgaggacaaactccgcaggggctgtgaatcccactgggagggcggcgggcctgcagcccgaggaaggcttgtgtgtcctcagttaaaactgtgcatatcgaaatatattttgttatttaagcctgcgtccccgt

SEQ ID NO: 1020 - DNA, 2420 bp, Homo sapiens
ctccctctgcggcgggggcggccccagcggatgaatgaagcggcgcgtggctgccggggaggccagagcgtggagcgctgcgcggcgcggcggccgggccctcgagacggggacggacacaccagcccctcggataccacttggccactcccgctgaggccactcccactgcgtggctgaagcctcgaggtcaccaggcggaggcgcggagatgcccctgcatcagctgggggacaagccgctcaccttccccagccccaactcagccatggaaaacgggcttgaccacaccccacccagcaggagggcatccccgggcacacccctgagccccggctccctccgctccgctgcccatagccccctggacaccagcaagcagcccctctgccagctctgggccgagaagcatggcgcccgggggacccatgaggtgcggtacgtctcggccgggcagagcgtggcgtgcggctggtgggccttcgcaccgccgtgcctgcaggtcctcaacacgcccaagggcatcctgttcttcctgtgtgcggccgcattcctgcaggggatgactgtgaatggcttcatcaacacagtcatcacctccctggagcgccgctatgacctgcacagctaccagagcgggctcatcgccagctcctacgacattgccgcctgcctctgcctcaccttcgtcagctacttcgggggctcagggcacaagccgcgctggctgggctggggcgtgctgcttatgggcacggggtcgctggtgttcgcgctgccccacttcacggctggccgctatgaggtggagttggacgcgggtgtcaggacgtgccctgccaaccccggcgcggtgtgtgcggacagcacctcgggcctgtcccgctaccagctggtcttcatgctgggccagttcctgcatggcgtgggtgccacacccctctacacgctgggcgtcacctacctggatgagaacgtcaagtccagctgctcgcccgtctacattgccatcttctacacagcggccatcctgggcccagctgccggctacctgattggaggtgccctgctgaatatctacacggaaatgggccgacggacggagctgaccaccgagagcccactgtgggtcggcgcctggtgggtcggcttcctgggctctggggccgctgctttcttcaccgccgttcccatccttggttaccctcggcagctgccaggctcccagcgctacgcggtcatgagagcggcggaaatgcaccagttgaaggacagcagccgtggggaggcgagcaacccggactttgggaaaaccatcagagacctgcctctctccatctggctcctgctgaagaaccccacgttcatcctgctctgcctggccggggccaccgaggccactctcatcaccggcatgtccacgttcagccccaagttcttggagtcccagttcagcctgagtgcctcagaagctgccaccttgtttgcctcctgcccgaaggccacctgaacctaacggctccctgcaacgctgcctgcagctgccagccagaacactacagccctgtgtgcggctcggacggcctcatgtacttctcactgtgccacgcagggtgccctgcagccacggagacgaatgtggacggccagaagatgtgtccgtgaccctcagagatcctttgccctgggaatccagtggattgtagttagaatactagggggcatcccggggcccatcgccttcggctgggtgatcgacaaggcctgtctgctgtggcaggaccagtgtggccagcagggctcctgcttggtgtaccagaattcggccatgagccgctacatactcatcatggggctcctgtacaaggtgctgggcgtcctcttctttgccatagcctgcttcttatacaagcccctgtcggagtcttcagatggcctggaaacttgtctgcccagccagtcctcagcccctgacagtgccacagatagccagctccagagcagcgtctgaccaccgcccgcgcccacccggccacggcgggcactcagcatttcctgatgacagaacagtgccgttgggtgatgcaatcacacgggaacttctatttgacctgcaaccttctacttaacctgtggtttaaagtcggctgtgacctcctgtccccagagctgtacggccctgcagtgggtgggaggaacttgcataaatatatatttatggacacacagtttgcatcagaacgtgtttatagaatgtgttttatacccgatcgtgtgtggtgtgcgtgaggacaaactccgcaggggctgtgaatcccactgggagggcggcgggcctgcagcccgaggaaggcttgtgtgtcctcagttaaaactgtgcatatcgaaatatattttgttatttaagcctgcgtccccgt

SEQ ID NO: 1021 - DNA, 2587 bp, Homo sapiens
ctccctctgcggcgggggcggccccagcggatgaatgaagcggcgcgtggctgccggggaggccagagcgtggagcgctgcgcggcgcggcggccgggccctcgagacggggacggacacaccagcccctcggataccacttggccactcccgctgaggccactcccactgcgtggctgaagcctcgaggtcaccaggcggaggcgcggagatgcccctgcatcagctgggggacaagccgctcaccttccccagccccaactcagccatggaaaacgggcttgaccacaccccacccagcaggagggcatccccgggcacacccctgagccccggctccctccgctccgctgcccatagccccctggacaccagcaagcagcccctctgccagctctgggccgagaagcatggcgcccgggggacccatgaggtgcggtacgtctcggccgggcagagcgtggcgtgcggctggtgggccttcgcaccgccgtgcctgcaggtcctcaacacgcccaagggcatcctgttcttcctgtgtgcggccgcattcctgcaggggatgactgtgaatggcttcatcaacacagtcatcacctccctggagcgccgctatgacctgcacagctaccagagcgggctcatcgccagctcctacgacattgccgcctgcctctgcctcaccttcgtcagctacttcgggggctcagggcacaagccgcgctggctgggctggggcgtgctgcttatgggcacggggtcgctggtgttcgcgctgccccacttcacggctggccgctatgaggtggagttggacgcgggtgtcaggacgtgccctgccaaccccggcgcggtgtgtgcggacagcacctcgggcctgtcccgctaccagctggtcttcatgctgggccagttcctgcatggcgtgggtgccacacccctctacacgctgggcgtcacctacctggatgagaacgtcaagtccagctgctcgcccgtctacattgccatcttctacacagcggccatcctgggcccagctgccggctacctgattggaggtgccctgctgaatatctacacggaaatgggccgacggacggagctgaccaccgagagcccactgtgggtcggcgcctggtgggtcggcttcctgggctctggggccgctgctttcttcaccgccgttcccatccttggttaccctcggcagctgccaggctcccagcgctacgcggtcatgagagcggcggaaatgcaccagttgaaggacagcagccgtggggaggcgagcaacccggactttgggaaaaccatcagagacctgcctctctccatctggctcctgctgaagaaccccacgttcatcctgctctgcctggccggggccaccgaggccactctcatcaccggcatgtccacgttcagccccaagttcttggagtcccagttcagcctgagtgcctcagaagctgccaccttgtttgggtacctggtggtgccagcgggtggtggcggcaccttcctgggcggcttctttgtgaacaagctcaggctccggggctccgcggtcatcaagttctgcctgttctgcaccgttgtcagcctgctgggcatcctcgtcttctcactgcactgccccagtgtgcccatggcgggcgtcacagccagctacggcgggagcctcctgcccgaaggccacctgaacctaacggctccctgcaacgctgcctgcagctgccagccagaacactacagccctgtgtgcggctcggacggcctcatgtacttctcactgtgccacgcagggtgccctgcagccacggagacgaatgtggacggccagaaggtgtaccgagactgtagctgtatccctcagaatctttcctctggttttggccatgccactgcagggaaatgcacttcaacttgtcagagaaagcccctccttctggttttcatattcgttgtaattttctttacattcctcagcagcattcctgcactaacggcaactctacgatgtgtccgtgaccctcagagatcctttgccctgggaatccagtggattgtagttagaatactagggggcatcccggggcccatcgccttcggctgggtgatcgacaaggcctgtctgctgtggcaggaccagtgtggccagcagggctcctgcttggtgtaccagaattcggccatgagccgctacatactcatcatggggctcctgtacaaggaagaagagaatgaatttagaaggctgtaaaccccatctgagccttacacatagatctccttgaattggattttcaccaaggccgtgatggatgtggagtctcggctttctgacaacgtcttccagagcaggctttctctagagggtggactgcctgtgttctcctgggagagaatgcatttgcttccgatgcccagggcacgaaagaggtggacgaaacaacggaagtggagggggtggattctctacctgggaaacccagcatggcacactcatatagaattaagatcttataataagtgtgcagatgcgcccgttctaaggaaataaagggttctgccctcctaagaa

SEQ ID NO: 1022 - DNA, 2444 bp, Homo sapiens
ctccctctgcggcgggggcggccccagcggatgaatgaagcggcgcgtggctgccggggaggccagagcgtggagcgctgcgcggcgcggcggccgggccctcgagacggggacggacacaccagcccctcggataccacttggccactcccgctgaggccactcccactgcgtggctgaagcctcgaggtcaccaggcggaggcgcggagatgcccctgcatcagctgggggacaagccgctcaccttccccagccccaactcagccatggaaaacgggcttgaccacaccccacccagcaggagggcatccccgggcacacccctgagccccggctccctccgctccgctgcccatagccccctggacaccagcaagcagcccctctgccagctctgggccgagaagcatggcgcccgggggacccatgaggtgcggtacgtctcggccgggcagagcgtggcgtgcggctggtgggccttcgcaccgccgtgcctgcaggtcctcaacacgcccaagggcatcctgttcttcctgtgtgcggccgcattcctgcaggggatgactgtgaatggcttcatcaacacagtcatcacctccctggagcgccgctatgacctgcacagctaccagagcgggctcatcgccagctcctacgacattgccgcctgcctctgcctcaccttcgtcagctacttcgggggctcagggcacaagccgcgctggctgggctggggcgtgctgcttatgggcacggggtcgctggtgttcgcgctgccccacttcacggctggccgctatgaggtggagttggacgcgggtgtcaggacgtgccctgccaaccccggcgcggtgtgtgcggacagcacctcgggcctgtcccgctaccagctggtcttcatgctgggccagttcctgcatggcgtgggtgccacacccctctacacgctgggcgtcacctacctggatgagaacgtcaagtccagctgctcgcccgtctacattgccatcttctacacagcggccatcctgggcccagctgccggctacctgattggaggtgccctgctgaatatctacacggaaatgggccgacggacggagctgaccaccgagagcccactgtgggtcggcgcctggtgggtcggcttcctgggctctggggccgctgctttcttcaccgccgttcccatccttggttaccctcggcagctgccaggctcccagcgctacgcggtcatgagagcggcggaaatgcaccagttgaaggacagcagccgtggggaggcgagcaacccggactttgggaaaaccatcagagacctgcctctctccatctggctcctgctgaagaaccccacgttcatcctgctctgcctggccggggccaccgaggccactctcatcaccggcatgtccacgttcagccccaagttcttggagtcccagttcagcctgagtgcctcagaagctgccaccttgtttgggtacctggtggtgccagcgggtggtggcggcaccttcctgggcggcttctttgtgaacaagctcaggctccggggctccgcggtcatcaagttctgcctgttctgcaccgttgtcagcctgctgggcatcctcgtcttctcactgcactgccccagtgtgcccatggcgggcgtcacagccagctacggcgggagcctcctgcccgaaggccacctgaacctaacggctccctgcaacgctgcctgcagctgccagccagaacactacagccctgtgtgcggctcggacggcctcatgtacttctcactgtgccacgcagggtgccctgcagccacggagacgaatgtggacggccagaagcagcattcctgcactaacggcaactctacgatgtgtccgtgaccctcagagatcctttgccctgggaatccagtggattgtagttagaatactagggggcatcccggggcccatcgccttcggctgggtgatcgacaaggcctgtctgctgtggcaggaccagtgtggccagcagggctcctgcttggtgtaccagaattcggccatgagccgctacatactcatcatggggctcctgtacaaggaagaagagaatgaatttagaaggctgtaaaccccatctgagccttacacatagatctccttgaattggattttcaccaaggccgtgatggatgtggagtctcggctttctgacaacgtcttccagagcaggctttctctagagggtggactgcctgtgttctcctgggagagaatgcatttgcttccgatgcccagggcacgaaagaggtggacgaaacaacggaagtggagggggtggattctctacctgggaaacccagcatggcacactcatatagaattaagatcttataataagtgtgcagatgcgcccgttctaaggaaataaagggttctgccctcctaagaa

SEQ ID NO: 1023 - DNA, 1381 bp, Homo sapiens
aaacaaatgaactagggaaaggggctgtgcatcaggcggacggtgctggggggcatgggtgtgccttccttgcgtgaggaggaaaaaccattctatcaccagaaggcagtgcccagtgtgagtgcccagcgtgctgggggcggtgcaagcttggcaagtttgtagacccgaaatgcaggctgcatggggacgagccccatggctgaccctgtgcctgctgggcgccagcatggctctggcctggaccctaccactcgcttgtcccccctctgcagcctcctgcccgaaggccacctgaacctaacggctccctgcaacgctgcctgcagctgccagccagaacactacagccctgtgtgcggctcggacggcctcatgtacttctcactgtgccacgcagggtgccctgcagccacggagacgaatgtggacggccagaaggtgtaccgagactgtagctgtatccctcagaatctttcctctggttttggccatgccactgcagggaaatgcacttcaacttgtcagagaaagcccctccttctggttttcatattcgttgtaattttctttacattcctcagcagcattcctgcactaacggcaactctacgatgtgtccgtgaccctcagagatcctttgccctgggaatccagtggattgtagttagaatactagggggcatcccggggcccatcgccttcggctgggtgatcgacaaggcctgtctgctgtggcaggaccagtgtggccagcagggctcctgcttggtgtaccagaattcggccatgagccgctacatactcatcatggggctcctgtacaaggtgctgggcgtcctcttctttgccatagcctgcttcttatacaagcccctgtcggagtcttcagatggcctggaaacttgtctgcccagccagtcctcagcccctgacagtgccacagatagccagctccagagcagcgtctgaccaccgcccgcgcccacccggccacggcgggcactcagcatttcctgatgacagaacagtgccgttgggtgatgcaatcacacgggaacttctatttgacctgcaaccttctacttaacctgtggtttaaagtcggctgtgacctcctgtccccagagctgtacggccctgcagtgggtgggaggaacttgcataaatatatatttatggacacacagtttgcatcagaacgtgtttatagaatgtgttttatacccgatcgtgtgtggtgtgcgtgaggacaaactccgcaggggctgtgaatcccactgggagggcggcgggcctgcagcccgaggaaggcttgtgtgtcctcagttaaaactgtgcatatcgaaatatattttgttatttaagcctgcgtccccgt

SEQ ID NO: 1024 - DNA, 1221 bp, Homo sapiens
ctccctctgcggcgggggcggccccagcggatgaatgaagcggcgcgtggctgccggggaggccagagcgtggagcgctgcgcggcgcggcggccgggccctcgagacggggacgcctcctgcccgaaggccacctgaacctaacggctccctgcaacgctgcctgcagctgccagccagaacactacagccctgtgtgcggctcggacggcctcatgtacttctcactgtgccacgcagggtgccctgcagccacggagacgaatgtggacggccagaaggtgtaccgagactgtagctgtatccctcagaatctttcctctggttttggccatgccactgcagggaaatgcacttcaacttgtcagagaaagcccctccttctggttttcatattcgttgtaattttctttacattcctcagcagcattcctgcactaacggcaactctacgatgtgtccgtgaccctcagagatcctttgccctgggaatccagtggattgtagttagaatactagggggcatcccggggcccatcgccttcggctgggtgatcgacaaggcctgtctgctgtggcaggaccagtgtggccagcagggctcctgcttggtgtaccagaattcggccatgagccgctacatactcatcatggggctcctgtacaaggtgctgggcgtcctcttctttgccatagcctgcttcttatacaagcccctgtcggagtcttcagatggcctggaaacttgtctgcccagccagtcctcagcccctgacagtgccacagatagccagctccagagcagcgtctgaccaccgcccgcgcccacccggccacggcgggcactcagcatttcctgatgacagaacagtgccgttgggtgatgcaatcacacgggaacttctatttgacctgcaaccttctacttaacctgtggtttaaagtcggctgtgacctcctgtccccagagctgtacggccctgcagtgggtgggaggaacttgcataaatatatatttatggacacacagtttgcatcagaacgtgtttatagaatgtgttttatacccgatcgtgtgtggtgtgcgtgaggacaaactccgcaggggctgtgaatcccactgggagggcggcgggcctgcagcccgaggaaggcttgtgtgtcctcagttaaaactgtgcatatcgaaatatattttgttatttaagcctgcgtccccgt

SEQ ID NO: 1025 - DNA, 1179 bp, Homo sapiens
ggagttggacaatgggcgcagtgtgctctgattcaagtgagaagtgcagatgtttgtgactgccgaggggcgtcctcctgcccgaaggccacctgaacctaacggctccctgcaacgctgcctgcagctgccagccagaacactacagccctgtgtgcggctcggacggcctcatgtacttctcactgtgccacgcagggtgccctgcagccacggagacgaatgtggacggccagaaggtgtaccgagactgtagctgtatccctcagaatctttcctctggttttggccatgccactgcagggaaatgcacttcaacttgtcagagaaagcccctccttctggttttcatattcgttgtaattttctttacattcctcagcagcattcctgcactaacggcaactctacgatgtgtccgtgaccctcagagatcctttgccctgggaatccagtggattgtagttagaatactagggggcatcccggggcccatcgccttcggctgggtgatcgacaaggcctgtctgctgtggcaggaccagtgtggccagcagggctcctgcttggtgtaccagaattcggccatgagccgctacatactcatcatggggctcctgtacaaggtgctgggcgtcctcttctttgccatagcctgcttcttatacaagcccctgtcggagtcttcagatggcctggaaacttgtctgcccagccagtcctcagcccctgacagtgccacagatagccagctccagagcagcgtctgaccaccgcccgcgcccacccggccacggcgggcactcagcatttcctgatgacagaacagtgccgttgggtgatgcaatcacacgggaacttctatttgacctgcaaccttctacttaacctgtggtttaaagtcggctgtgacctcctgtccccagagctgtacggccctgcagtgggtgggaggaacttgcataaatatatatttatggacacacagtttgcatcagaacgtgtttatagaatgtgttttatacccgatcgtgtgtggtgtgcgtgaggacaaactccgcaggggctgtgaatcccactgggagggcggcgggcctgcagcccgaggaaggcttgtgtgtcctcagttaaaactgtgcatatcgaaatatattttgttatttaagcctgcgtccccgt

SEQ ID NO: 1026 - DNA, 3571 bp, Homo sapiens
aaacaaatgaactagggaaaggggctgtgcatcaggcggacggtgctggggggcatgggtgtgccttccttgcgtgaggaggaaaaaccattctatcaccagaaggcagtgcccagtgtgagtgcccagcgtgctgggggcggtgcaagcttggcaagtttgtagacccgaaatgcaggctgcatggggacgagccccatggctgaccctgtgcctgctgggcgccagcatggctctggcctggaccctaccactcgcttgtcccccctctgcagcctcctgcccgaaggccacctgaacctaacggctccctgcaacgctgcctgcagctgccagccagaacactacagccctgtgtgcggctcggacggcctcatgtacttctcactgtgccacgcagggtgccctgcagccacggagacgaatgtggacggccagaaggtgagtggagccgctgcctaccgcccctgtcctcccctggaccctgggaaggggcccccgtgccttccccttgtaatcggagctattgttgggcttcccaggtgtaccgagactgtagctgtatccctcagaatctttcctctggttttggccatgccactgcagggaaatgcacttcaacttgtcagagaaagcccctccttctggttttcatattcgttgtaattttctttacattcctcagcagcattcctgcactaacggcaactctacggtaagctggggtcgggtgtgcgcttgtccagagctttccttgcagcaccctgaggcggagctctgcagatcctgagacaggagcactccaggaaacacccaggtctaagcgggcctgtctgtcactggtggcaggagagacctcactgtctctgatctctgacgaggggcttcccacttgggggggggtgatgatgtggctggggactggtccaggaggccactggcctagggggtgacttggcatgcaaccccacttctgtgggtgctgacgctgtggttttctattgcagatgtgtccgtgaccctcagagatcctttgccctgggaatccagtggattgtagttagaatactagggggcatcccggggcccatcgccttcggctgggtgatcgacaaggcctgtctgctgtggcaggaccagtgtggccagcagggctcctgcttggtgtaccagaattcggccatgagccgctacatactcatcatggggctcctgtacaagtttcagttaccagaggtccaccacagtctgaatgtattaaataggaaattccagaagcaaacagttcataacctttaaagcacgcgccgttctgcacagtctggtgagatcttgatctgtcctgcccaggactcggattctccctttgtccaactttggaagaaggcaaggtcagaacttattctgcagggagctttggggatattggatactaaggcccaagccctctgtgatacgcctttcgctttggcataaaataacggttgactctctgttaggcgcgtctctgctcagggagtggtggtgtttggggaagcccaaaggcacatgagcatcaggaaattgaccatttgacttcataagacataacctttgtccagcgtgtccaggctattcatgccaccacctgttgatcacttagcagccggtgtggttcccacatcccccatcaccatatcacagtgccatgttcaagccactcttatttacctaatcatggccccaaagcaccggagcactcacgccgccgttcagctctgccaatgggaagccggaggcgcctccttcagcgagaaggtgtagttccttggctgggcttagtactacccttagactcacgcgtccacaggggtctcagtgtctgcggatgagggggctgctgtactttcccagggagccgtccccagactctctctttgctgtgttggatgcatcccttagctgggagcagcaggctgagagccctccacacgcagccatcccctgggctcagcacagccagcgggagccgtatccagagggtcagagttggcctcagcagcgcatgcgtccatgttaattgtagcgggggagcacacggtgtctccttataaacaccctcgcattccactttgtcctgcaccgagtcaaaacagcctcactccctgaatgcaggctcagggccatcagccaggctgacactccaggaggcacagtgggtgtttctggtccacgcccagcgtggaaatcatagtggtgcacatgtactctgcgtgggcattgcggcagcatccgtgcttggacctcaccgcctttggggcccacgtgggattcctgccacatcgtcctcttgccctgcaaagtcggtgcagcccctcattgttgacaaagaaaccaagaccctgaaggttcagaactgcccatgatggtggcaccggggcttgaaccccggctgtggtggtgaccggcgactggctctgtgtgaggttcctgtggccgccacgacaaaggaccgcaagcggggtggcctgatgtagcagaaccagattcgcttgcaggtgggggcagggcgggctccttccgccgctctggctctctgcagctgcatgtggcctttccctctgtccctgcctcaagtcttcctctcctttctctcatgaggacaccagtcattggatttggggcccaccttagatccaggatggtctcatctcaaatccttaattacatctgcaaagaccctatttccaaaaaaggtcccattcactggtgtctggcactgttcaacccatgacaagcccctcagtcctgtgcctctgtttttagtcaaagggtgtgtttcattccctctaacaatattggcgtctgctctacaaaccggttatatgggaaagataccctctcagagcaggatgggtttccgtggacctggtgagggtgctgcaggctggggcagggacaggactgggacaggcccaccagtatccaaaggctctggccgagctccccacgaggtccagcgggctcctctctccccaggtgctgggcgtcctcttctttgccatagcctgcttcttatacaagcccctgtcggagtcttcagatggcctggaaacttgtctgcccagccagtcctcagcccctgacagtgccacagatagccagctccagagcagcgtctgaccaccgcccgcgcccacccggccacggcgggcactcagcatttcctgatgacagaacagtgccgttgggtgatgcaatcacacgggaacttctatttgacctgcaaccttctacttaacctgtggtttaaagtcggctgtgacctcctgtccccagagctgtacggccctgcagtgggtgggaggaacttgcataaatatatatttatggacacacagtttgcatcagaacgtgtttatagaatgtgttttatacccgatcgtgtgtggtgtgcgtgaggacaaactccgcaggggctgtgaatcccactgggagggcggcgggcctgcagcccgaggaaggcttgtgtgtcctcagttaaaactgtgcatatcgaaatatattttgttatttaagcctgcgtccccgt

SEQ ID NO: 1027 - DNA, 1006 bp, Homo sapiens
ggagttggacaatgggcgcagtgtgctctgattcaagtgagaagtgcagatgtttgtgactgccgaggggcgtcctcctgcccgaaggccacctgaacctaacggctccctgcaacgctgcctgcagctgccagccagaacactacagccctgtgtgcggctcggacggcctcatgtacttctcactgtgccacgcagggtgccctgcagccacggagacgaatgtggacggccagaagatgtgtccgtgaccctcagagatcctttgccctgggaatccagtggattgtagttagaatactagggggcatcccggggcccatcgccttcggctgggtgatcgacaaggcctgtctgctgtggcaggaccagtgtggccagcagggctcctgcttggtgtaccagaattcggccatgagccgctacatactcatcatggggctcctgtacaaggtgctgggcgtcctcttctttgccatagcctgcttcttatacaagcccctgtcggagtcttcagatggcctggaaacttgtctgcccagccagtcctcagcccctgacagtgccacagatagccagctccagagcagcgtctgaccaccgcccgcgcccacccggccacggcgggcactcagcatttcctgatgacagaacagtgccgttgggtgatgcaatcacacgggaacttctatttgacctgcaaccttctacttaacctgtggtttaaagtcggctgtgacctcctgtccccagagctgtacggccctgcagtgggtgggaggaacttgcataaatatatatttatggacacacagtttgcatcagaacgtgtttatagaatgtgttttatacccgatcgtgtgtggtgtgcgtgaggacaaactccgcaggggctgtgaatcccactgggagggcggcgggcctgcagcccgaggaaggcttgtgtgtcctcagttaaaactgtgcatatcgaaatatattttgttatttaagcctgcgtccccgt

SEQ ID NO: 1028 - DNA, 569 bp, Homo sapiens
aaacaaatgaactagggaaaggggctgtgcatcaggcggacggtgctggggggcatgggtgtgccttccttgcgtgaggaggaaaaaccattctatcaccagaaggcagtgcccagtggtgccctgcagccacggagacgaatgtggacggccagaagcagcattcctgcactaacggcaactctacgatgtgtccgtgaccctcagagatcctttgccctgggaatccagtggattgtagttagaatactagggggcatcccggggcccatcgccttcggctgggtgatcgacaaggcctgtctgctgtggcaggaccagtgtggccagcagggctcctgcttggtgtaccagaattcggccatgagccgctacatactcatcatggggctcctgtacaaggctcccctgctgaggattcatcccaccttggatggaaaatgcagtttttgtgggagatggaactggagggtacggagggctgactgcacatacaaatatacatacatgagtgtacatatgttcttatataaacgtgtcacagtaaaattgttcctcatcttgcgtta

SEQ ID NO: 1029 - DNA, 177 bp, Artificial
  Synthetic oligonucleotide
gacacaccagcccctcggataccacttggccactcccgctgaggccactcccactgcgtggctgaagcctcgaggtcaccaggcggaggcgcggagatgcccctgcatcagctgggggacaagccgctcaccttccccagccccaactcagccatggaaaacgggcttgaccacacc

SEQ ID NO: 1030 - DNA, 646 bp, Artificial
  Synthetic oligonucleotide
ccacccagcaggagggcatccccgggcacacccctgagccccggctccctccgctccgctgcccatagccccctggacaccagcaagcagcccctctgccagctctgggccgagaagcatggcgcccgggggacccatgaggtgcggtacgtctcggccgggcagagcgtggcgtgcggctggtgggccttcgcaccgccgtgcctgcaggtcctcaacacgcccaagggcatcctgttcttcctgtgtgcggccgcattcctgcaggggatgactgtgaatggcttcatcaacacagtcatcacctccctggagcgccgctatgacctgcacagctaccagagcgggctcatcgccagctcctacgacattgccgcctgcctctgcctcaccttcgtcagctacttcgggggctcagggcacaagccgcgctggctgggctggggcgtgctgcttatgggcacggggtcgctggtgttcgcgctgccccacttcacggctggccgctatgaggtggagttggacgcgggtgtcaggacgtgccctgccaaccccggcgcggtgtgtgcggacagcacctcgggcctgtcccgctaccagctggtcttcatgctgggccagttcctgcatggcgtgggtgccacac

SEQ ID NO: 1031 - DNA, 122 bp, Artificial
  Synthetic oligonucleotide
gacggagctgaccaccgagagcccactgtgggtcggcgcctggtgggtcggcttcctgggctctggggccgctgctttcttcaccgccgttcccatccttggttaccctcggcagctgccag

SEQ ID NO: 1032 - DNA, 155 bp, Artificial
  Synthetic oligonucleotide
ctccatctggctcctgctgaagaaccccacgttcatcctgctctgcctggccggggccaccgaggccactctcatcaccggcatgtccacgttcagccccaagttcttggagtcccagttcagcctgagtgcctcagaagctgccaccttgtttg

SEQ ID NO: 1033 - DNA, 196 bp, Artificial
  Synthetic oligonucleotide
ggtacctggtggtgccagcgggtggtggcggcaccttcctgggcggcttctttgtgaacaagctcaggctccggggctccgcggtcatcaagttctgcctgttctgcaccgttgtcagcctgctgggcatcctcgtcttctcactgcactgccccagtgtgcccatggcgggcgtcacagccagctacggcgggag

SEQ ID NO: 1034 - DNA, 158 bp, Artificial
  Synthetic oligonucleotide
gtgagtgcccagcgtgctgggggcggtgcaagcttggcaagtttgtagacccgaaatgcaggctgcatggggacgagccccatggctgaccctgtgcctgctgggcgccagcatggctctggcctggaccctaccactcgcttgtcccccctctgcag

SEQ ID NO: 1035 - DNA, 125 bp, Artificial
  Synthetic oligonucleotide
cctcctgcccgaaggccacctgaacctaacggctccctgcaacgctgcctgcagctgccagccagaacactacagccctgtgtgcggctcggacggcctcatgtacttctcactgtgccacgcag

SEQ ID NO: 1036 - DNA, 143 bp, Artificial
  Synthetic oligonucleotide
gtgtaccgagactgtagctgtatccctcagaatctttcctctggttttggccatgccactgcagggaaatgcacttcaacttgtcagagaaagcccctccttctggttttcatattcgttgtaattttctttacattcctcag

SEQ ID NO: 1037 - DNA, 256 bp, Artificial
  Synthetic oligonucleotide
gtaagctggggtcgggtgtgcgcttgtccagagctttccttgcagcaccctgaggcggagctctgcagatcctgagacaggagcactccaggaaacacccaggtctaagcgggcctgtctgtcactggtggcaggagagacctcactgtctctgatctctgacgaggggcttcccacttgggggggggtgatgatgtggctggggactggtccaggaggccactggcctagggggtgacttggcatgcaaccccac

SEQ ID NO: 1038 - DNA, 149 bp, Artificial
  Synthetic oligonucleotide
ggggcatcccggggcccatcgccttcggctgggtgatcgacaaggcctgtctgctgtggcaggaccagtgtggccagcagggctcctgcttggtgtaccagaattcggccatgagccgctacatactcatcatggggctcctgtacaag

SEQ ID NO: 1039 - DNA, 140 bp, Artificial
  Synthetic oligonucleotide
acgataaagcacaaagccttctaaataaaatgcggtcccacggccagctgttcagaggatcttgacgctcttccttgggtgacggacccaggagagttcatcctgcaggaacccgtggcctcaggctttccaggagggag

SEQ ID NO: 1040 - DNA, 158 bp, Artificial
  Synthetic oligonucleotide
gttagagaaagggaaggagcccagctggttcacctcccctcggattagcagaaaagaggcgagtctgagcagggccttgtgtggctctggagagaagcagtgggttaaggagacatacacctcggtttccccctcatctgaggtttcactttccacag

SEQ ID NO: 1041 - DNA, 170 bp, Artificial
  Synthetic oligonucleotide
tttcagttaccagaggtccaccacagtctgaatgtattaaataggaaattccagaagcaaacagttcataacctttaaagcacgcgccgttctgcacagtctggtgagatcttgatctgtcctgcccaggactcggattctccctttgtccaactttggaagaaggcaag

SEQ ID NO: 1042 - DNA, 1567 bp, Artificial
  Synthetic oligonucleotide
gtcagaacttattctgcagggagctttggggatattggatactaaggcccaagccctctgtgatacgcctttcgctttggcataaaataacggttgactctctgttaggcgcgtctctgctcagggagtggtggtgtttggggaagcccaaaggcacatgagcatcaggaaattgaccatttgacttcataagacataacctttgtccagcgtgtccaggctattcatgccaccacctgttgatcacttagcagccggtgtggttcccacatcccccatcaccatatcacagtgccatgttcaagccactcttatttacctaatcatggccccaaagcaccggagcactcacgccgccgttcagctctgccaatgggaagccggaggcgcctccttcagcgagaaggtgtagttccttggctgggcttagtactacccttagactcacgcgtccacaggggtctcagtgtctgcggatgagggggctgctgtactttcccagggagccgtccccagactctctctttgctgtgttggatgcatcccttagctgggagcagcaggctgagagccctccacacgcagccatcccctgggctcagcacagccagcgggagccgtatccagagggtcagagttggcctcagcagcgcatgcgtccatgttaattgtagcgggggagcacacggtgtctccttataaacaccctcgcattccactttgtcctgcaccgagtcaaaacagcctcactccctgaatgcaggctcagggccatcagccaggctgacactccaggaggcacagtgggtgtttctggtccacgcccagcgtggaaatcatagtggtgcacatgtactctgcgtgggcattgcggcagcatccgtgcttggacctcaccgcctttggggcccacgtgggattcctgccacatcgtcctcttgccctgcaaagtcggtgcagcccctcattgttgacaaagaaaccaagaccctgaaggttcagaactgcccatgatggtggcaccggggcttgaaccccggctgtggtggtgaccggcgactggctctgtgtgaggttcctgtggccgccacgacaaaggaccgcaagcggggtggcctgatgtagcagaaccagattcgcttgcaggtgggggcagggcgggctccttccgccgctctggctctctgcagctgcatgtggcctttccctctgtccctgcctcaagtcttcctctcctttctctcatgaggacaccagtcattggatttggggcccaccttagatccaggatggtctcatctcaaatccttaattacatctgcaaagaccctatttccaaaaaaggtcccattcactggtgtctggcactgttcaacccatgacaagcccctcagtcctgtgcctctgtttttagtcaaagggtgtgtttcattccctctaacaatattggcgtctgctctacaaaccggttatatgggaaagataccctctcagagcaggatgggtttccgtggacctggtgagggtgctgcaggctggggcagggacaggactgggacaggcccac

SEQ ID NO: 1043 - DNA, 580 bp, Artificial
  Synthetic oligonucleotide
ctccagagcagcgtctgaccaccgcccgcgcccacccggccacggcgggcactcagcatttcctgatgacagaacagtgccgttgggtgatgcaatcacacgggaacttctatttgacctgcaaccttctacttaacctgtggtttaaagtcggctgtgacctcctgtccccagagctgtacggccctgcagtgggtgggaggaacttgcataaatatatatttatggacacacagtttgcatcagaacgtgtttatagaatgtgttttatacccgatcgtgtgtggtgtgcgtgaggacaaactccgcaggggctgtgaatcccactgggagggcggcgggcctgcagcccgaggaaggcttgtgtgtcctcagttaaaactgtgcatatcgaaatatattttgttatttaagcctgcgtccccgtaccgcgtgctttatttctatgagtttgcagagtttggtggtctcgccatccttggcccacgtcctgtagtcagccctgtggaatccgcggatatgaaaagttggccttccttatccacaggctcccccgtaagtcggccttccttatccacag

SEQ ID NO: 1044 - DNA, 167 bp, Artificial
  Synthetic oligonucleotide
gctcccctgctgaggattcatcccaccttggatggaaaatgcagtttttgtgggagatggaactggagggtacggagggctgactgcacatacaaatatacatacatgagtgtacatatgttcttatataaacgtgtcacagtaaaattgttcctcatcttgcgtta

SEQ ID NO: 1045 - DNA, 351 bp, Artificial
  Synthetic oligonucleotide
gaagaagagaatgaatttagaaggctgtaaaccccatctgagccttacacatagatctccttgaattggattttcaccaaggccgtgatggatgtggagtctcggctttctgacaacgtcttccagagcaggctttctctagagggtggactgcctgtgttctcctgggagagaatgcatttgcttccgatgcccagggcacgaaagaggtggacgaaacaacggaagtggagggggtggattctctacctgggaaacccagcatggcacactcatatagaattaagatcttataataagtgtgcagatgcgcccgttctaaggaaataaagggttctgccctcctaagaa

SEQ ID NO: 1046 - DNA, 115 bp, Artificial
  Synthetic oligonucleotide
ctccctctgcggcgggggcggccccagcggatgaatgaagcggcgcgtggctgccggggaggccagagcgtggagcgctgcgcggcgcggcggccgggccctcgagacggggacg

SEQ ID NO: 1047 - DNA, 69 bp, Artificial
  Synthetic oligonucleotide
ccctctacacgctgggcgtcacctacctggatgagaacgtcaagtccagctgctcgcccgtctacattg

SEQ ID NO: 1048 - DNA, 91 bp, Artificial
  Synthetic oligonucleotide
ccatcttctacacagcggccatcctgggcccagctgccggctacctgattggaggtgccctgctgaatatctacacggaaatgggccgacg

SEQ ID NO: 1049 - DNA, 112 bp, Artificial
  Synthetic oligonucleotide
gctcccagcgctacgcggtcatgagagcggcggaaatgcaccagttgaaggacagcagccgtggggaggcgagcaacccggactttgggaaaaccatcagagacctgcctct

SEQ ID NO: 1050 - DNA, 73 bp, Artificial
  Synthetic oligonucleotide
ggagttggacaatgggcgcagtgtgctctgattcaagtgagaagtgcagatgtttgtgactgccgaggggcgt

SEQ ID NO: 1051 - DNA, 117 bp, Artificial
  Synthetic oligonucleotide
aaacaaatgaactagggaaaggggctgtgcatcaggcggacggtgctggggggcatgggtgtgccttccttgcgtgaggaggaaaaaccattctatcaccagaaggcagtgcccagt

SEQ ID NO: 1052 - DNA, 41 bp, Artificial
  Synthetic oligonucleotide
ggtgccctgcagccacggagacgaatgtggacggccagaag

SEQ ID NO: 1053 - DNA, 101 bp, Artificial
  Synthetic oligonucleotide
gtgagtggagccgctgcctaccgcccctgtcctcccctggaccctgggaaggggcccccgtgccttccccttgtaatcggagctattgttgggcttcccag

SEQ ID NO: 1054 - DNA, 30 bp, Artificial
  Synthetic oligonucleotide
cagcattcctgcactaacggcaactctacg

SEQ ID NO: 1055 - DNA, 36 bp, Artificial
  Synthetic oligonucleotide
ttctgtgggtgctgacgctgtggttttctattgcag

SEQ ID NO: 1056 - DNA, 65 bp, Artificial
  Synthetic oligonucleotide
atgtgtccgtgaccctcagagatcctttgccctgggaatccagtggattgtagttagaatactag

SEQ ID NO: 1057 - DNA, 63 bp, Artificial
  Synthetic oligonucleotide
gtactgtgcagtgtgaggaagccatggtcagttgcacagtgtgctcactgcacaagggcatgg

SEQ ID NO: 1058 - DNA, 60 bp, Artificial
  Synthetic oligonucleotide
cagtatccaaaggctctggccgagctccccacgaggtccagcgggctcctctctccccag

SEQ ID NO: 1059 - DNA, 32 bp, Artificial
  Synthetic oligonucleotide
gtgctgggcgtcctcttctttgccatagcctg

SEQ ID NO: 1060 - DNA, 61 bp, Artificial
  Synthetic oligonucleotide
cttcttatacaagcccctgtcggagtcttcagatggcctggaaacttgtctgcccagccag

SEQ ID NO: 1061 - DNA, 33 bp, Artificial
  Synthetic oligonucleotide
tcctcagcccctgacagtgccacagatagccag

SEQ ID NO: 1062 - protein, 722 aa, Homo sapiens
MPLHQLGDKPLTFPSPNSAMENGLDHTPPSRRASPGTPLSPGSLRSAAHSPLDTSKQPLCQLWAEKHGARGTHEVRYVSAGQSVACGWWAFAPPCLQVLNTPKGILFFLCAAAFLQGMTVNGFINTVITSLERRYDLHSYQSGLIASSYDIAACLCLTFVSYFGGSGHKPRWLGWGVLLMGTGSLVFALPHFTAGRYEVELDAGVRTCPANPGAVCADSTSGLSRYQLVFMLGQFLHGVGATPLYTLGVTYLDENVKSSCSPVYIAIFYTAAILGPAAGYLIGGALLNIYTEMGRRTELTTESPLWVGAWWVGFLGSGAAAFFTAVPILGYPRQLPGSQRYAVMRAAEMHQLKDSSRGEASNPDFGKTIRDLPLSIWLLLKNPTFILLCLAGATEATLITGMSTFSPKFLESQFSLSASEAATLFGYLVVPAGGGGTFLGGFFVNKLRLRGSAVIKFCLFCTVVSLLGILVFSLHCPSVPMAGVTASYGGSLLPEGHLNLTAPCNAACSCQPEHYSPVCGSDGLMYFSLCHAGCPAATETNVDGQKVYRDCSCIPQNLSSGFGHATAGKCTSTCQRKPLLLVFIFVVIFFTFLSSIPALTATLRCVRDPQRSFALGIQWIVVRILGGIPGPIAFGWVIDKACLLWQDQCGQQGSCLVYQNSAMSRYILIMGLLYKVLGVLFFAIACFLYKPLSESSDGLETCLPSQSSAPDSATDSQLQSSV

SEQ ID NO: 1063 - protein, 722 aa, Homo sapiens; identical to SEQ ID NO: 1062

SEQ ID NO: 1064 - protein, 700 aa, Homo sapiens
MPLHQLGDKPLTFPSPNSAMENGLDHTPPSRRASPGTPLSPGSLRSAAHSPLDTSKQPLCQLWAEKHGARGTHEVRYVSAGQSVACGWWAFAPPCLQVLNTPKGILFFLCAAAFLQGMTVNGFINTVITSLERRYDLHSYQSGLIASSYDIAACLCLTFVSYFGGSGHKPRWLGWGVLLMGTGSLVFALPHFTAGRYEVELDAGVRTCPANPGAVCADSTSGLSRYQLVFMLGQFLHGVGATPLYTLGVTYLDENVKSSCSPVYIAIFYTAAILGPAAGYLIGGALLNIYTEMGRRTELTTESPLWVGAWWVGFLGSGAAAFFTAVPILGYPRQLPGSQRYAVMRAAEMHQLKDSSRGEASNPDFGKTIRDLPLSIWLLLKNPTFILLCLAGATEATLITGMSTFSPKFLESQFSLSASEAATLFGYLVVPAGGGGTFLGGFFVNKLRLRGSAVIKFCLFCTVVSLLGILVFSLHCPSVPMAGVTASYGGSLLPEGHLNLTAPCNAACSCQPEHYSPVCGSDGLMYFSLCHAGCPAATETNVDGQKVYRDCSCIPQNLSSGFGHATAGKCTSTCQRKPLLLVFIFVVIFFTFLSSIPALTATLRCVRDPQRSFALGIQWIVVRILGGIPGPIAFGWVIDKACLLWQDQCGQQGSCLVYQNSAMSRYILIMGLLYKFQLPEVHHSLNVLNRKFQKQTVHNL

SEQ ID NO: 1065 - protein, 682 aa, Homo sapiens
MPLHQLGDKPLTFPSPNSAMENGLDHTPPSRRASPGTPLSPGSLRSAAHSPLDTSKQPLCQLWAEKHGARGTHEVRYVSAGQSVACGWWAFAPPCLQVLNTPKGILFFLCAAAFLQGMTVNGFINTVITSLERRYDLHSYQSGLIASSYDIAACLCLTFVSYFGGSGHKPRWLGWGVLLMGTGSLVFALPHFTAGRYEVELDAGVRTCPANPGAVCADSTSGLSRYQLVFMLGQFLHGVGATPLYTLGVTYLDENVKSSCSPVYIAIFYTAAILGPAAGYLIGGALLNIYTEMGRRTELTTESPLWVGAWWVGFLGSGAAAFFTAVPILGYPRQLPGSQRYAVMRAAEMHQLKDSSRGEASNPDFGKTIRDLPLSIWLLLKNPTFILLCLAGATEATLITGMSTFSPKFLESQFSLSASEAATLFGYLVVPAGGGGTFLGGFFVNKLRLRGSAVIKFCLFCTVVSLLGILVFSLHCPSVPMAGVTASYGGSLLPEGHLNLTAPCNAACSCQPEHYSPVCGSDGLMYFSLCHAGCPAATETNVDGQKVYRDCSCIPQNLSSGFGHATAGKCTSTCQRKPLLLVFIFVVIFFTFLSSIPALTATLRCVRDPQRSFALGIQWIVVRILGGIPGPIAFGWVIDKACLLWQDQCGQQGSCLVYQNSAMSRYILIMGLLYKTIKHKAF

SEQ ID NO: 1066 - protein, 703 aa, Homo sapiens
MPLHQLGDKPLTFPSPNSAMENGLDHTPPSRRASPGTPLSPGSLRSAAHSPLDTSKQPLCQLWAEKHGARGTHEVRYVSAGQSVACGWWAFAPPCLQVLNTPKGILFFLCAAAFLQGMTVNGFINTVITSLERRYDLHSYQSGLIASSYDIAACLCLTFVSYFGGSGHKPRWLGWGVLLMGTGSLVFALPHFTAGRYEVELDAGVRTCPANPGAVCADSTSGLSRYQLVFMLGQFLHGVGATPLYTLGVTYLDENVKSSCSPVYIAIFYTAAILGPAAGYLIGGALLNIYTEMGRRTELTTESPLWVGAWWVGFLGSGAAAFFTAVPILGYPRQLPGSQRYAVMRAAEMHQLKDSSRGEASNPDFGKTIRDLPLSIWLLLKNPTFILLCLAGATEATLITGMSTFSPKFLESQFSLSASEAATLFGYLVVPAGGGGTFLGGFFVNKLRLRGSAVIKFCLFCTVVSLLGILVFSLHCPSVPMAGVTASYGGSLLPEGHLNLTAPCNAACSCQPEHYSPVCGSDGLMYFSLCHAGCPAATETNVDGQKVYRDCSCIPQNLSSGFGHATAGKCTSTCQRKPLLLVFIFVVIFFTFLSSIPALTATLRCVRDPQRSFALGIQWIVVRILGTVQCEEAMVSCTVCSLHKGMGGIPGPIAFGWVIDKACLLWQDQCGQQGSCLVYQNSAMSRYILIMGLLYKTIKHKAF

SEQ ID NO: 1067 - protein, 604 aa, Homo sapiens
MPLHQLGDKPLTFPSPNSAMENGLDHTPPSRRASPGTPLSPGSLRSAAHSPLDTSKQPLCQLWAEKHGARGTHEVRYVSAGQSVACGWWAFAPPCLQVLNTPKGILFFLCAAAFLQGMTVNGFINTVITSLERRYDLHSYQSGLIASSYDIAACLCLTFVSYFGGSGHKPRWLGWGVLLMGTGSLVFALPHFTAGRYEVELDAGVRTCPANPGAVCADSTSGLSRYQLVFMLGQFLHGVGATPLYTLGVTYLDENVKSSCSPVYIAIFYTAAILGPAAGYLIGGALLNIYTEMGRRTELTTESPLWVGAWWVGFLGSGAAAFFTAVPILGYPRQLPGSQRYAVMRAAEMHQLKDSSRGEASNPDFGKTIRDLPLSIWLLLKNPTFILLCLAGATEATLITGMSTFSPKFLESQFSLSASEAATLFGYLVVPAGGGGTFLGGFFVNKLRLRGSAVIKFCLFCTVVSLLGILVFSLHCPSVPMAGVTASYGGSLLPEGHLNLTAPCNAACSCQPEHYSPVCGSDGLMYFSLCHAGCPAATETNVDGQKVYRDCSCIPQNLSSGFGHATAGKCTSTCQRKPLLLVFIFVVIFFTFLSSIPALTATLR

SEQ ID NO: 1068 - protein, 620 aa, Homo sapiens
MPLHQLGDKPLTFPSPNSAMENGLDHTPPSRRASPGTPLSPGSLRSAAHSPLDTSKQPLCQLWAEKHGARGTHEVRYVSAGQSVACGWWAFAPPCLQVLNTPKGILFFLCAAAFLQGMTVNGFINTVITSLERRYDLHSYQSGLIASSYDIAACLCLTFVSYFGGSGHKPRWLGWGVLLMGTGSLVFALPHFTAGRYEVELDAGVRTCPANPGAVCADSTSGLSRYQLVFMLGQFLHGVGATPLYTLGVTYLDENVKSSCSPVYIAIFYTAAILGPAAGYLIGGALLNIYTEMGRRTELTTESPLWVGAWWVGFLGSGAAAFFTAVPILGYPRQLPGSQRYAVMRAAEMHQLKDSSRGEASNPDFGKTIRDLPLSIWLLLKNPTFILLCLAGATEATLITGMSTFSPKFLESQFSLSASEAATLFGYLVVPAGGGGTFLGGFFVNKLRLRGSAVIKFCLFCTVVSLLGILVFSLHCPSVPMAGVTASYGGSLLPEGHLNLTAPCNAACSCQPEHYSPVCGSDGLMYFSLCHAGCPAATETNVDGQKVSGAAAYRPCPPLDPGKGPPCLPLVIGAIVGLPRCTETVAVSLRIFPLVLAMPLQGNALQLVRESPSFWFSYSL

SEQ ID NO: 1069 - protein, 549 aa, Homo sapiens
MPLHQLGDKPLTFPSPNSAMENGLDHTPPSRRASPGTPLSPGSLRSAAHSPLDTSKQPLCQLWAEKHGARGTHEVRYVSAGQSVACGWWAFAPPCLQVLNTPKGILFFLCAAAFLQGMTVNGFINTVITSLERRYDLHSYQSGLIASSYDIAACLCLTFVSYFGGSGHKPRWLGWGVLLMGTGSLVFALPHFTAGRYEVELDAGVRTCPANPGAVCADSTSGLSRYQLVFMLGQFLHGVGATPLYTLGVTYLDENVKSSCSPVYIAIFYTAAILGPAAGYLIGGALLNIYTEMGRRTELTTESPLWVGAWWVGFLGSGAAAFFTAVPILGYPRQLPGSQRYAVMRAAEMHQLKDSSRGEASNPDFGKTIRDLPLSIWLLLKNPTFILLCLAGATEATLITGMSTFSPKFLESQFSLSASEAATLFGYLVVPAGGGGTFLGGFFVNKLRLRGSAVIKFCLFCTVVSLLGILVFSLHCPSVPMAGVTASYGGSLLPEGHLNLTAPCNAACSCQPEHYSPVCGSDGLMYFSLCHAGCPAATETNVDGQKMCP

SEQ ID NO: 1070 - protein, 559 aa, Homo sapiens
MPLHQLGDKPLTFPSPNSAMENGLDHTPPSRRASPGTPLSPGSLRSAAHSPLDTSKQPLCQLWAEKHGARGTHEVRYVSAGQSVACGWWAFAPPCLQVLNTPKGILFFLCAAAFLQGMTVNGFINTVITSLERRYDLHSYQSGLIASSYDIAACLCLTFVSYFGGSGHKPRWLGWGVLLMGTGSLVFALPHFTAGRYEVELDAGVRTCPANPGAVCADSTSGLSRYQLVFMLGQFLHGVGATPLYTLGVTYLDENVKSSCSPVYIAIFYTAAILGPAAGYLIGGALLNIYTEMGRRTELTTESPLWVGAWWVGFLGSGAAAFFTAVPILGYPRQLPGSQRYAVMRAAEMHQLKDSSRGEASNPDFGKTIRDLPLSIWLLLKNPTFILLCLAGATEATLITGMSTFSPKFLESQFSLSASEAATLFGYLVVPAGGGGTFLGGFFVNKLRLRGSAVIKFCLFCTVVSLLGILVFSLHCPSVPMAGVTASYGGSLLPEGHLNLTAPCNAACSCQPEHYSPVCGSDGLMYFSLCHAGCPAATETNVDGQKQHSCTNGNSTMCP

SEQ ID NO: 1071 - protein, 400 aa, Homo sapiens
MASSTQSSPPWSAAMTCTATRAGSSPAPTTLPPASASPSSATSGAQGTSRAGWAGACCLWARGRWCSRCPTSRLAAMRWSWTRVSGRALPTPARCVRTAPRACPATSWSSCWASSCMAWVPHPSTRWASPTWMRTSSPAARPSTLDGADHREPTVGRRLVGRLPGLWGRCFLHRRSHPWLPSAAARLPALRGHESGGNAPVEGQQPWGGEQPGLWENHQRPASLHLAPAEEPHVHPALPGRGHRGHSHHRHVHVQPQVLGVPVQPECLRSCHLVWVPGGASGWWRHLPGRLLCEQAQAPGLRGHQVLPVLHRCQPAGHPRLLTALPQCAHGGRHSQLRREPPARRPPEPNGSLQRCLQLPARTLQPCVRLGRPHVLLTVPRRVPCSHGDECGRPEGVPRL

SEQ ID NO: 1072 - protein, 743 aa, Homo sapiens
MPLHQLGDKPLTFPSPNSAMENGLDHTPPSRRASPGTPLSPGSLRSAAHSPLDTSKQPLCQLWAEKHGARGTHEVRYVSAGQSVACGWWAFAPPCLQVLNTPKGILFFLCAAAFLQGMTVNGFINTVITSLERRYDLHSYQSGLIASSYDIAACLCLTFVSYFGGSGHKPRWLGWGVLLMGTGSLVFALPHFTAGRYEVELDAGVRTCPANPGAVCADSTSGLSRYQLVFMLGQFLHGVGATPLYTLGVTYLDENVKSSCSPVYIAIFYTAAILGPAAGYLIGGALLNIYTEMGRRTELTTESPLWVGAWWVGFLGSGAAAFFTAVPILGYPRQLPGSQRYAVMRAAEMHQLKDSSRGEASNPDFGKTIRDLPLSIWLLLKNPTFILLCLAGATEATLITGMSTFSPKFLESQFSLSASEAATLFGYLVVPAGGGGTFLGGFFVNKLRLRGSAVIKFCLFCTVVSLLGILVFSLHCPSVPMAGVTASYGGSLLPEGHLNLTAPCNAACSCQPEHYSPVCGSDGLMYFSLCHAGCPAATETNVDGQKVYRDCSCIPQNLSSGFGHATAGKCTSTCQRKPLLLVFIFVVIFFTFLSSIPALTATLRCVRDPQRSFALGIQWIVVRILGTVQCEEAMVSCTVCSLHKGMGGIPGPIAFGWVIDKACLLWQDQCGQQGSCLVYQNSAMSRYILIMGLLYKVLGVLFFAIACFLYKPLSESSDGLETCLPSQSSAPDSATDSQLQSSV

SEQ ID NO: 1073 - protein, 432 aa, Homo sapiens
MPLHQLGDKPLTFPSPNSAMENGLDHTPPSRRASPGTPLSPGSLRSAAHSPLDTSKQPLCQLWAEKHGARGTHEVRYVSAGQSVACGWWAFAPPCLQVLNTPKGILFFLCAAAFLQGMTVNGFINTVITSLERRYDLHSYQSGLIASSYDIAACLCLTFVSYFGGSGHKPRWLGWGVLLMGTGSLVFALPHFTAGRYEVELDAGVRTCPANPGAVCADSTSGLSRYQLVFMLGQFLHGVGATPLYTLGVTYLDENVKSSCSPVYIAIFYTAAILGPAAGYLIGGALLNIYTEMGRRTELTTESPLWVGAWWVGFLGSGAAAFFTAVPILGYPRQLPGSQRYAVMRAAEMHQLKDSSRGEASNPDFGKTIRDLPLSIWLLLKNPTFILLCLAGATEATLITGMSTFSPKFLESQFSLSASEAATLFASCPKAT

SEQ ID NO: 1074 - protein, 684 aa, Homo sapiens
MPLHQLGDKPLTFPSPNSAMENGLDHTPPSRRASPGTPLSPGSLRSAAHSPLDTSKQPLCQLWAEKHGARGTHEVRYVSAGQSVACGWWAFAPPCLQVLNTPKGILFFLCAAAFLQGMTVNGFINTVITSLERRYDLHSYQSGLIASSYDIAACLCLTFVSYFGGSGHKPRWLGWGVLLMGTGSLVFALPHFTAGRYEVELDAGVRTCPANPGAVCADSTSGLSRYQLVFMLGQFLHGVGATPLYTLGVTYLDENVKSSCSPVYIAIFYTAAILGPAAGYLIGGALLNIYTEMGRRTELTTESPLWVGAWWVGFLGSGAAAFFTAVPILGYPRQLPGSQRYAVMRAAEMHQLKDSSRGEASNPDFGKTIRDLPLSIWLLLKNPTFILLCLAGATEATLITGMSTFSPKFLESQFSLSASEAATLFGYLVVPAGGGGTFLGGFFVNKLRLRGSAVIKFCLFCTVVSLLGILVFSLHCPSVPMAGVTASYGGSLLPEGHLNLTAPCNAACSCQPEHYSPVCGSDGLMYFSLCHAGCPAATETNVDGQKVYRDCSCIPQNLSSGFGHATAGKCTSTCQRKPLLLVFIFVVIFFTFLSSIPALTATLRCVRDPQRSFALGIQWIVVRILGGIPGPIAFGWVIDKACLLWQDQCGQQGSCLVYQNSAMSRYILIMGLLYKEEENEFRRL

SEQ ID NO: 1075 - protein, 262 aa, Homo sapiens
MGTSPMADPVPAGRQHGSGLDPTTRLSPLCSLLPEGHLNLTAPCNAACSCQPEHYSPVCGSDGLMYFSLCHAGCPAATETNVDGQKVYRDCSCIPQNLSSGFGHATAGKCTSTCQRKPLLLVFIFVVIFFTFLSSIPALTATLRCVRDPQRSFALGIQWIVVRILGGIPGPIAFGWVIDKACLLWQDQCGQQGSCLVYQNSAMSRYILIMGLLYKVLGVLFFAIACFLYKPLSESSDGLETCLPSQSSAPDSATDSQLQSSV

SEQ ID NO: 1076 - protein, 198 aa, Homo sapiens [sequence omitted]

SEQ ID NO: 1077 - protein, 160 aa, Homo sapiens [sequence omitted]

SEQ ID NO: 1078 - protein, 124 aa, Homo sapiens
MWTARRCVRDPQRSFALGIQWIVVRILGGIPGPIAFGWVIDKACLLWQDQCGQQGSCLVYQNSAMSRYILIMGLLYKVLGVLFFAIACFLYKPLSESSDGLETCLPSQSSAPDSATDSQLQSSV

SEQ ID NO: 1079 - protein, 171 aa, Homo sapiens
MGVPSLREEEKPFYHQKAVPSGALQPRRRMWTARSSIPALTATLRCVRDPQRSFALGIQWIVVRILGGIPGPIAFGWVIDKACLLWQDQCGQQGSCLVYQNSAMSRYILIMGLLYKAPLLRIHPTLDGKCSFCGRWNWRVRRADCTYKYTYMSVHMFLYKRVTVKLFLILR

SEQ ID NO: 1080 - protein, 661 aa, Homo sapiens
MPLHQLGDKPLTFPSPNSAMENGLDHTPPSRRASPGTPLSPGSLRSAAHSPLDTSKQPLCQLWAEKHGARGTHEVRYVSAGQSVACGWWAFAPPCLQVLNTPKGILFFLCAAAFLQGMTVNGFINTVITSLERRYDLHSYQSGLIASSYDIAACLCLTFVSYFGGSGHKPRWLGWGVLLMGTGSLVFALPHFTAGRYEVELDAGVRTCPANPGAVCADSTSGLSRYQLVFMLGQFLHGVGATPLYTLGVTYLDENVKSSCSPVYIAIFYTAAILGPAAGYLIGGALLNIYTEMGRRTELTTESPLWVGAWWVGFLGSGAAAFFTAVPILGYPRQLPGSQRYAVMRAAEMHQLKDSSRGEASNPDFGKTIRDLPLSIWLLLKNPTFILLCLAGATEATLITGMSTFSPKFLESQFSLSASEAATLFGYLVVPAGGGGTFLGGFFVNKLRLRGSAVIKFCLFCTVVSLLGILVFSLHCPSVPMAGVTASYGGSLLPEGHLNLTAPCNAACSCQPEHYSPVCGSDGLMYFSLCHAGCPAATETNVDGQKVSGAAAYRPCPPLDPGKGPPCLPLVIGAIVGLPRCTETVAVSLRIFPLVLAMHCREMHFNLSEKAPPSGFHIRCNFLYIPQQHSCTNGNSTVSWGRVCACPELSLQHPEAELCRS

SEQ ID NO: 1081 - DNA, 5376 bp, Homo sapiens
ggcggcggcggcggcgcgcggggactcggaggtactgggcgcgcgcggctccggctcgggacgcctcgggacgcctcggggtcgggctccggctgcggctgctgctgcggcgcccgcgctccggtgcgctccgcctcctgtgcccgccgcggagcgcagtctgcgcgcccgccgtgcgccctcagctccttttcctgagcccgccgcgatgggagctgcgcggggatccccggccagaccccgccggttgcctctgctcagcgtcctgctgctgccgctgctgggcggtacccagacagccattgtcttcatcaagcagccgtcctcccaggatgcactgcaggggcgccgggcgctgcttcgctgtgaggttgaggctccgggcccggtacatgtgtactggctgctcgatggggcccctgtccaggacacggagcggcgtttcgcccagggcagcagcctgagctttgcagctgtggaccggctgcaggactctggcaccttccagtgtgtggctcgggatgatgtcactggagaagaagcccgcagtgccaacgcctccttcaacatcaaatggattgaggcaggtcctgtggtcctgaagcatccagcctcggaagctgagatccagccacagacccaggtcacacttcgttgccacattgatgggcaccctcggcccacctaccaatggttccgagatgggacccccctttctgatggtcagagcaaccacacagtcagcagcaaggagcggaacctgacgctccggccagctggtcctgagcatagtgggctgtattcctgctgcgcccacagtgcttttggccaggcttgcagcagccagaacttcaccttgagcattgctgatgaaagctttgccagggtggtgctggcaccccaggacgtggtagtagcgaggtatgaggaggccatgttccattgccagttctcagcccagccacccccgagcctgcagtggctctttgaggatgagactcccatcactaaccgcagtcgccccccacacctccgcagagccacagtgtttgccaacgggtctctgctgctgacccaggtccggccacgcaatgcagggatctaccgctgcattggccaggggcagaggggcccacccatcatcctggaagccacacttcacctagcagagattgaagacatgccgctatttgagccacgggtgtttacagctggcagcgaggagcgtgtgacctgccttccccccaagggtctgccagagcccagcgtgtggtgggagcacgcgggagtccggctgcccacccatggcagggtctaccagaagggccacgagctggtgttggccaatattgctgaaagtgatgctggtgtctacacctgccacgcggccaacctggctggtcagcggagacaggatgtcaacatcactgtggccactgtgccctcctggctgaagaagccccaagacagccagctggaggagggcaaacccggctacttggattgcctgacccaggccacaccaaaacctacagttgtctggtacagaaaccagatgctcatctcagaggactcacggttcgaggtcttcaagaatgggaccttgcgcatcaacagcgtggaggtgtatgatgggacatggtaccgttgtatgagcagcaccccagccggcagcatcgaggcgcaagcccgtgtccaagtgctggaaaagctcaagttcacaccaccaccccagccacagcagtgcatggagtttgacaaggaggccacggtgccctgttcagccacaggccgagagaagcccactattaagtgggaacgggcagatgggagcagcctcccagagtgggtgacagacaacgctgggaccctgcattttgcccgggtgactcgagatgacgctggcaactacacttgcattgcctccaacgggccgcagggccagattcgtgcccatgtccagctcactgtggcagtttttatcaccttcaaagtggaaccagagcgtacgactgtgtaccagggccacacagccctactgcagtgcgaggcccagggggaccccaagccgctgattcagtggaaaggcaaggaccgcatcctggaccccaccaagctgggacccaggatgcacatcttccagaatggctccctggtgatccatgacgtggcccctgaggactcaggccgctacacctgcattgcaggcaacagctgcaacatcaagcacacggaggcccccctctatgtcgtgggtatgggctggggagggttatgctgcacaggaagtggtgggcccagacgtttgtcaccttgtactcagcccctgtgtacagaacatggcacagaagccatttttgtggcagcggtggggattcggccgtctcaccatgctgctgcacagtcttagagtccttgctcagagccgggctgtcgtttatttaacatccaacggtcggtgtgtgtgtgtgtgtgttgtgggggagtgggggggtgttctcttcctacaatgctgcctcccaggttcctgcagcagccacacatatctctgggtggctggggaggaggaccaggtcagaatgcagtaggacaaggttcttttctccaggaggcccagagaggatgatgggtcaggtaaaaggccctgcacttaactctctgcccctgggagacttatttctcctctggggacttgtttctgcatccacaggtgaaagtggtttaaatgagaagctcttaaactttcttggtttggcagcagagttatttttctagacaaagtataatgtgaaagtttaaatggatgaaaatgaactgaggaggcccccttggtgggagccactggggtgtgtgtggcagttgggggatcctgcatggtctcccttcattcccctaatgcctcttgaggcccctcagtgtgggccattaaaaggcccctagaccagcagatcccttctacagatctgcttattgaaaaacctgctctgtgccaggcagtgcctggaattctaaacctgaagctcccaaatgctgctctccggggcctggctcacattatcaagtcacttgggaagcttaacaaataacgtgggtttgtggtagctccttgacaggtgtgcttatccgtgtcgcctgtcttggcttccgatgcaaagccagcttgggaacccctggcctcatctccttcagagtcttcgtttgaccttggtggggcatgaggacctgctggcccttgttaaagccagtgaaggtggtgaccctcccgggccatctgttaagttgccctgttgatggggttgggaggagttagtagagaagcagggcttcttttgcttagcagcccctgcccagacccatctgtgtgtctctcagacaagcctgtgccggaggagtcggagggccctggcagccctcccccctacaagatgatccagaccattgggttgtcggtgggtgccgctgtggcctacatcattgccgtgctgggcctcatgttctactgcaagaagcgctgcaaagccaagcggctgcagaagcagcccgagggcgaggagccagagatggaatgcctcaacggtgggcctttgcagaacgggcagccctcagcagagatccaagaagaagtggccttgaccagcttgggctccggccccgcggccaccaacaaacgccacagcacaagtgataagatgcacttcccacggtctagcctgcagcccatcaccacgctggggaagagtgagtttggggaggtgttcctggcaaaggctcagggcttggaggagggagtggcagagaccctggtacttgtgaagagcctgcagagcaaggatgagcagcagcagctggacttccggagggagttggagatgtttgggaagctgaaccacgccaacgtggtgcggctcctggggctgtgccgggaggctgagccccactacatggtgctggaatatgtggatctgggagacctcaagcagttcctgaggatttccaagagcaaggatgaaaaattgaagtcacagcccctcagcaccaagcagaaggtggccctatgcacccaggtagccctgggcatggagcacctgtccaacaaccgctttgtgcataaggacttggctgcgcgtaactgcctggtcagtgcccagagacaagtgaaggtgtctgccctgggcctcagcaaggatgtgtacaacagtgagtactaccacttccgccaggcctgggtgccgctgcgctggatgtcccccgaggccatcctggagggtgacttctctaccaagtctgatgtctgggccttcggtgtgctgatgtgggaagtgtttacacatggagagatgccccatggtgggcaggcagatgatgaagtactggcagatttgcaggctgggaaggctagacttcctcagcccgagggctgcccttccaaactctatcggctgatgcagcgctgctgggccctcagccccaaggaccggccctccttcagtgagattgccagcgccctgggagacagcaccgtggacagcaagccgtgaggagggagcccgctcaggatggcctgggcaggggaggacatctctagagggaagctcacagcatgatgggcaagatccctgtcctcctgggccctgaggcccctgccctagtgcaacaggcattgctgaggtctgagcagggcctggcctttcctcctcttcctcaccctcatcctttgggaggctgacttggacccaaactgggcgactagggctttgagctgggcagttttccctgccacctcttcctctatcagggacagtgtgggtgccacaggtaaccccaatttctggccttcaacttctccccttgaccgggtccaactctgccactcatctgccaactttgcctggggagggctaggcttgggatgagctgggtttgtggggagttccttaatattctcaagttctgggcacacagggttaatgagtctcttggcccactggtcccacttgggggtctagaccaggattatagaggacacagcaagtgagtcctccccactctgggcttgtgcacactgacccagacccacgtcttccccacccttctctcctttcctcatcctaagtgcctggcagatgaaggagttttcaggagcttttgacactatataaaccgccctttttgtatgcaccacgggcggcttttatatgtaattgcagcgtggggtgggtgggcatgggaggtaggggtgggccctggagatgaggagggtgggccatccttaccccacacttttattgttgtcgttttttgtttgttttgtttttttgtttttgtttttgtttttacactcgctgctctcaataaataagccttttttacaacctg

SEQ ID NO: 1082 - DNA, 5360 bp, Homo sapiens
ggcggcggcggcggcgcgcggggactcggaggtactgggcgcgcgcggctccggctcgggacgcctcgggacgcctcggggtcgggctccggctgcggctgctgctgcggcgcccgcgctccggtgcgctccgcctcctgtgcccgccgcggagcgcagtctgcgcgcccgccgtgcgccctcagctccttttcctgagcccgccgcgatgggagctgcgcggggatccccggccagaccccgccggttgcctctgctcagcgtcctgctgctgccgctgctgggcggtacccagacagccattgtcttcatcaagcagccgtcctcccaggatgcactgcaggggcgccgggcgctgcttcgctgtgaggttgaggctccgggcccggtacatgtgtactggctgctcgatggggcccctgtccaggacacggagcggcgtttcgcccagggcagcagcctgagctttgcagctgtggaccggctgcaggactctggcaccttccagtgtgtggctcgggatgatgtcactggagaagaagcccgcagtgccaacgcctccttcaacatcaaatggattgaggcaggtcctgtggtcctgaagcatccagcctcggaagctgagatccagccacagacccaggtcacacttcgttgccacattgatgggcaccctcggcccacctaccaatggttccgagatgggacccccctttctgatggtcagagcaaccacacagtcagcagcaaggagcggaacctgacgctccggccagctggtcctgagcatagtgggctgtattcctgctgcgcccacagtgcttttggccaggcttgcagcagccagaacttcaccttgagcattgctgatgaaagctttgccagggtggtgctggcaccccaggacgtggtagtagcgaggtatgaggaggccatgttccattgccagttctcagcccagccacccccgagcctgcagtggctctttgaggatgagactcccatcactaaccgcagtcgccccccacacctccgcagagccacagtgtttgccaacgggtctctgctgctgacccaggtccggccacgcaatgcagggatctaccgctgcattggccaggggcagaggggcccacccatcatcctggaagccacacttcacctagcagagattgaagacatgccgctatttgagccacgggtgtttacagctggcagcgaggagcgtgtgacctgccttccccccaagggtctgccagagcccagcgtgtggtgggagcacgcgggagtccggctgcccacccatggcagggtctaccagaagggccacgagctggtgttggccaatattgctgaaagtgatgctggtgtctacacctgccacgcggccaacctggctggtcagcggagacaggatgtcaacatcactgtggccactgtgccctcctggctgaagaagccccaagacagccagctggaggagggcaaacccggctacttggattgcctgacccaggccacaccaaaacctacagttgtctggtacagaaaccagatgctcatctcagaggactcacggttcgaggtcttcaagaatgggaccttgcgcatcaacagcgtggaggtgtatgatgggacatggtaccgttgtatgagcagcaccccagccggcagcatcgaggcgcaagcccgtgtccaagtgctggaaaagctcaagttcacaccaccaccccagccacagcagtgcatggagtttgacaaggaggccacggtgccctgttcagccacaggccgagagaagcccactattaagtgggaacgggcagatgggagcagcctcccagagtgggtgacagacaacgctgggaccctgcattttgcccgggtgactcgagatgacgctggcaactacacttgcattgcctccaacgggccgcagggccagattcgtgcccatgtccagctcactgtggcagtttttatcaccttcaaagtggaaccagagcgtacgactgtgtaccagggccacacagccctactgcagtgcgaggcccagggggaccccaagccgctgattcagtggaaaggcaaggaccgcatcctggaccccaccaagctgggacccagaatggctccctggtgatccatgacgtggcccctgaggactcaggccgctacacctgcattgcaggcaacagctgcaacatcaagcacacggaggcccccctctatgtcgtgggtatgggctggggagggttatgctgcacaggaagtggtgggcccagacgtttgtcaccttgtactcagcccctgtgtacagaacatggcacagaagccatttttgtggcagcggtggggattcggccgtctcaccatgctgctgcacagtcttagagtccttgctcagagccgggctgtcgtttatttaacatccaacggtcggtgtgtgtgtgtgtgtgttgtgggggagtgggggggtgttctcttcctacaatgctgcctcccaggttcctgcagcagccacacatatctctgggtggctggggaggaggaccaggtcagaatgcagtaggacaaggttcttttctccaggaggcccagagaggatgatgggtcaggtaaaaggccctgcacttaactctctgcccctgggagacttatttctcctctggggacttgtttctgcatccacaggtgaaagtggtttaaatgagaagctcttaaactttcttggtttggcagcagagttatttttctagacaaagtataatgtgaaagtttaaatggatgaaaatgaactgaggaggcccccttggtgggagccactggggtgtgtgtggcagttgggggatcctgcatggtctcccttcattcccctaatgcctcttgaggcccctcagtgtgggccattaaaaggcccctagaccagcagatcccttctacagatctgcttattgaaaaacctgctctgtgccaggcagtgcctggaattctaaacctgaagctcccaaatgctgctctccggggcctggctcacattatcaagtcacttgggaagcttaacaaataacgtgggtttgtggtagctccttgacaggtgtgcttatccgtgtcgcctgtcttggcttccgatgcaaagccagcttgggaacccctggcctcatctccttcagagtcttcgtttgaccttggtggggcatgaggacctgctggcccttgttaaagccagtgaaggtggtgaccctcccgggccatctgttaagttgccctgttgatggggttgggaggagttagtagagaagcagggcttcttttgcttagcagcccctgcccagacccatctgtgtgtctctcagacaagcctgtgccggaggagtcggagggccctggcagccctcccccctacaagatgatccagaccattgggttgtcggtgggtgccgctgtggcctacatcattgccgtgctgggcctcatgttctactgcaagaagcgctgcaaagccaagcggctgcagaagcagcccgagggcgaggagccagagatggaatgcctcaacggtgggcctttgcagaacgggcagccctcagcagagatccaagaagaagtggccttgaccagcttgggctccggccccgcggccaccaacaaacgccacagcacaagtgataagatgcacttcccacggtctagcctgcagcccatcaccacgctggggaagagtgagtttggggaggtgttcctggcaaaggctcagggcttggaggagggagtggcagagaccctggtacttgtgaagagcctgcagagcaaggatgagcagcagcagctggacttccggagggagttggagatgtttgggaagctgaaccacgccaacgtggtgcggctcctggggctgtgccgggaggctgagccccactacatggtgctggaatatgtggatctgggagacctcaagcagttcctgaggatttccaagagcaaggatgaaaaattgaagtcacagcccctcagcaccaagcagaaggtggccctatgcacccaggtagccctgggcatggagcacctgtccaacaaccgctttgtgcataaggacttggctgcgcgtaactgcctggtcagtgcccagagacaagtgaaggtgtctgccctgggcctcagcaaggatgtgtacaacagtgagtactaccacttccgccaggcctgggtgccgctgcgctggatgtcccccgaggccatcctggagggtgacttctctaccaagtctgatgtctgggccttcggtgtgctgatgtgggaagtgtttacacatggagagatgccccatggtgggcaggcagatgatgaagtactggcagatttgcaggctgggaaggctagacttcctcagcccgagggctgcccttccaaactctatcggctgatgcagcgctgctgggccctcagccccaaggaccggccctccttcagtgagattgccagcgccctgggagacagcaccgtggacagcaagccgtgaggagggagcccgctcaggatggcctgggcaggggaggacatctctagagggaagctcacagcatgatgggcaagatccctgtcctcctgggccctgaggcccctgccctagtgcaacaggcattgctgaggtctgagcagggcctggcctttcctcctcttcctcaccctcatcctttgggaggctgacttggacccaaactgggcgactagggctttgagctgggcagttttccctgccacctcttcctctatcagggacagtgtgggtgccacaggtaaccccaatttctggccttcaacttctccccttgaccgggtccaactctgccactcatctgccaactttgcctggggagggctaggcttgggatgagctgggtttgtggggagttccttaatattctcaagttctgggcacacagggttaatgagtctcttggcccactggtcccacttgggggtctagaccaggattatagaggacacagcaagtgagtcctccccactctgggcttgtgcacactgacccagacccacgtcttccccacccttctctcctttcctcatcctaagtgcctggcagatgaaggagttttcaggagcttttgacactatataaaccgccctttttgtatgcaccacgggcggcttttatatgtaattgcagcgtggggtgggtgggcatgggaggtaggggtgggccctggagatgaggagggtgggccatccttaccccacacttttattgttgtcgttttttgtttgttttgtttttttgtttttgtttttgtttttacactcgctgctctcaataaataagccttttttacaacctg

SEQ ID NO: 1083 - DNA, 4349 bp, Homo sapiens
ggcggcggcggcggcgcgcggggactcggaggtactgggcgcgcgcggctccggctcgggacgcctcgggacgcctcggggtcgggctccggctgcggctgctgctgcggcgcccgcgctccggtgcgctccgcctcctgtgcccgccgcggagcgcagtctgcgcgcccgccgtgcgccctcagctccttttcctgagcccgccgcgatgggagctgcgcggggatccccggccagaccccgccggttgcctctgctcagcgtcctgctgctgccgctgctgggcggtacccagacagccattgtcttcatcaagcagccgtcctcccaggatgcactgcaggggcgccgggcgctgcttcgctgtgaggttgaggctccgggcccggtacatgtgtactggctgctcgatggggcccctgtccaggacacggagcggcgtttcgcccagggcagcagcctgagctttgcagctgtggaccggctgcaggactctggcaccttccagtgtgtggctcgggatgatgtcactggagaagaagcccgcagtgccaacgcctccttcaacatcaaatggattgaggcaggtcctgtggtcctgaagcatccagcctcggaagctgagatccagccacagacccaggtcacacttcgttgccacattgatgggcaccctcggcccacctaccaatggttccgagatgggacccccctttctgatggtcagagcaaccacacagtcagcagcaaggagcggaacctgacgctccggccagctggtcctgagcatagtgggctgtattcctgctgcgcccacagtgcttttggccaggcttgcagcagccagaacttcaccttgagcattgctggtgagcctggggtgggggcggaagggatgaggtgagcacaggagggcctcaccacccaggctgcatgctcccccatctttccctctccagatgaaagctttgccagggtggtgctggcaccccaggacgtggtagtagcgaggtatgaggaggccatgttccattgccagttctcagcccagccacccccgagcctgcagtggctctttgaggatgagactcccatcactaaccgcagtcgccccccacacctccgcagagccacagtgtttgccaacgggtctctgctgctgacccaggtccggccacgcaatgcagggatctaccgctgcattggccaggggcagaggggcccacccatcatcctggaagccacacttcacctagcagagattgaagacatgccgctatttgagccacgggtgtttacagctggcagcgaggagcgtgtgacctgccttccccccaagggtctgccagagcccagcgtgtggtgggagcacgcgggagtccggctgcccacccatggcagggtctaccagaagggccacgagctggtgttggccaatattgctgaaagtgatgctggtgtctacacctgccacgcggccaacctggctggtcagcggagacaggatgtcaacatcactgtggccactgtgccctcctggctgaagaagccccaagacagccagctggaggagggcaaacccggctacttggattgcctgacccaggccacaccaaaacctacagttgtctggtacagaaaccagatgctcatctcagaggactcacggttcgaggtcttcaagaatgggaccttgcgcatcaacagcgtggaggtgtatgatgggacatggtaccgttgtatgagcagcaccccagccggcagcatcgaggcgcaagcccgtgtccaagtgctggaaaagctcaagttcacaccaccaccccagccacagcagtgcatggagtttgacaaggaggccacggtgccctgttcagccacaggccgagagaagcccactattaagtgggaacgggcagatgggagcagcctcccagagtgggtgacagacaacgctgggaccctgcattttgcccgggtgactcgagatgacgctggcaactacacttgcattgcctccaacgggccgcagggccagattcgtgcccatgtccagctcactgtggcagtttttatcaccttcaaagtggaaccagagcgtacgactgtgtaccagggccacacagccctactgcagtgcgaggcccagggggaccccaagccgctgattcagtggaaaggcaaggaccgcatcctggaccccaccaagctgggacccaggatgcacatcttccagaatggctccctggtgatccatgacgtggcccctgaggactcaggccgctacacctgcattgcaggcaacagctgcaacatcaagcacacggaggcccccctctatgtcgtggacaagcctgtgccggaggagtcggagggccctggcagccctcccccctacaagatgatccagaccattgggttgtcggtgggtgccgctgtggcctacatcattgccgtgctgggcctcatgttctactgcaagaagcgctgcaaagccaagcggctgcagaagcagcccgagggcgaggagccagagatggaatgcctcaacggtgggcctttgcagaacgggcagccctcagcagagatccaagaagaagtggccttgaccagcttgggctccggccccgcggccaccaacaaacgccacagcacaagtgataagatgcacttcccacggtctagcctgcagcccatcaccacgctggggaagagtgagtttggggaggtgttcctggcaaaggctcagggcttggaggagggagtggcagagaccctggtacttgtgaagagcctgcagagcaaggatgagcagcagcagctggacttccggagggagttggagatgtttgggaagctgaaccacgccaacgtggtgcggctcctggggctgtgccgggaggctgagccccactacatggtgctggaatatgtggatctgggagacctcaagcagttcctgaggatttccaagagcaaggatgaaaaattgaagtcacagcccctcagcaccaagcagaaggtggccctatgcacccaggtagccctgggcatggagcacctgtccaacaaccgctttgtgcataaggacttggctgcgcgtaactgcctggtcagtgcccagagacaagtgaaggtgtctgccctgggcctcagcaaggatgtgtacaacagtgagtactaccacttccgccaggcctgggtgccgctgcgctggatgtcccccgaggccatcctggagggtgacttctctaccaagtctgatgtctgggccttcggtgtgctgatgtgggaagtgtttacacatggagagatgccccatggtgggcaggcagatgatgaagtactggcagatttgcaggctgggaaggctagacttcctcagcccgagggctgcccttccaaactctatcggctgatgcagcgctgctgggccctcagccccaaggaccggccctccttcagtgagattgccagcgccctgggagacagcaccgtggacagcaagccgtgaggagggagcccgctcaggatggcctgggcaggggaggacatctctagagggaagctcacagcatgatgggcaagatccctgtcctcctgggccctgaggcccctgccctagtgcaacaggcattgctgaggtctgagcagggcctggcctttcctcctcttcctcaccctcatcctttgggaggctgacttggacccaaactgggcgactagggctttgagctgggcagttttccctgccacctcttcctctatcagggacagtgtgggtgccacaggtaaccccaatttctggccttcaacttctccccttgaccgggtccaactctgccactcatctgccaactttgcctggggagggctaggcttgggatgagctgggtttgtggggagttccttaatattctcaagttctgggcacacagggttaatgagtctcttggcccactggtcccacttgggggtctagaccaggattatagaggacacagcaagtgagtcctccccactctgggcttgtgcacactgacccagacccacgtcttccccacccttctctcctttcctcatcctaagtgcctggcagatgaaggagttttcaggagcttttgacactatataaaccgccctttttgtatgcaccacgggcggcttttatatgtaattgcagcgtggggtgggtgggcatgggaggtaggggtgggccctggagatgaggagggtgggccatccttaccccacacttttattgttgtcgttttttgtttgttttgtttttttgtttttgtttttgtttttacactcgctgctctcaataaataagccttttttacaacctg

SEQ ID NO: 1084 - DNA, 4063 bp, Homo sapiens
ggcggcggcggcggcgcgcggggactcggaggtactgggcgcgcgcggctccggctcgggacgcctcgggacgcctcggggtcgggctccggctgcggctgctgctgcggcgcccgcgctccggtgcgctccgcctcctgtgcccgccgcggagcgcagtctgcgcgcccgccgtgcgccctcagctccttttcctgagcccgccgcgatgggagctgcgcggggatccccggccagaccccgccggttgcctctgctcagcgtcctgctgctgccgctgctgggcggtacccagacagccattgtcttcatcaagcagccgtcctcccaggatgcactgcaggggcgccgggcgctgcttcgctgtgaggttgaggctccgggcccggtacatgtgtactggctgctcgatggggcccctgtccaggacacggagcggcgtttcgcccagggcagcagcctgagctttgcagctgtggaccggctgcaggactctggcaccttccagtgtgtggctcgggatgatgtcactggagaagaagcccgcagtgccaacgcctccttcaacatcaaatggattgaggcaggtcctgtggtcctgaagcatccagcctcggaagctgagatccagccacagacccaggtcacacttcgttgccacattgatgggcaccctcgatgaaagctttgccagggtggtgctggcaccccaggacgtggtagtagcgaggtatgaggaggccatgttccattgccagttctcagcccagccacccccgagcctgcagtggctctttgaggatgagactcccatcactaaccgcagtcgccccccacacctccgcagagccacagtgtttgccaacgggtctctgctgctgacccaggtccggccacgcaatgcagggatctaccgctgcattggccaggggcagaggggcccacccatcatcctggaagccacacttcacctagcagagattgaagacatgccgctatttgagccacgggtgtttacagctggcagcgaggagcgtgtgacctgccttccccccaagggtctgccagagcccagcgtgtggtgggagcacgcgggagtccggctgcccacccatggcagggtctaccagaagggccacgagctggtgttggccaatattgctgaaagtgatgctggtgtctacacctgccacgcggccaacctggctggtcagcggagacaggatgtcaacatcactgtggccactgtgccctcctggctgaagaagccccaagacagccagctggaggagggcaaacccggctacttggattgcctgacccaggccacaccaaaacctacagttgtctggtacagaaaccagatgctcatctcagaggactcacggttcgaggtcttcaagaatgggaccttgcgcatcaacagcgtggaggtgtatgatgggacatggtaccgttgtatgagcagcaccccagccggcagcatcgaggcgcaagcccgtgtccaagtgctggaaaagctcaagttcacaccaccaccccagccacagcagtgcatggagtttgacaaggaggccacggtgccctgttcagccacaggccgagagaagcccactattaagtgggaacgggcagatgggagcagcctcccagagtgggtgacagacaacgctgggaccctgcattttgcccgggtgactcgagatgacgctggcaactacacttgcattgcctccaacgggccgcagggccagattcgtgcccatgtccagctcactgtggcagtttttatcaccttcaaagtggaaccagagcgtacgactgtgtaccagggccacacagccctactgcagtgcgaggcccagggggaccccaagccgctgattcagtggaaaggcaaggaccgcatcctggaccccaccaagctgggacccaggatgcacatcttccagaatggctccctggtgatccatgacgtggcccctgaggactcaggccgctacacctgcattgcaggcaacagctgcaacatcaagcacacggaggcccccctctatgtcgtggcctgtgccggaggagtcggagggccctggcagccctcccccctacaagatgatccagaccattgggttgtcggtgggtgccgctgtggcctacatcattgccgtgctgggcctcatgttctactgcaagaagcgctgcaaagccaagcggctgcagaagcagcccgagggcgaggagccagagatggaatgcctcaacggtgggcctttgcagaacgggcagccctcagcagagatccaagaagaagtggccttgaccagcttgggctccggccccgcggccaccaacaaacgccacagcacaagtgataagatgcacttcccacggtctagcctgcagcccatcaccacgctggggaagagtgagtttggggaggtgttcctggcaaaggctcagggcttggaggagggagtggcagagaccctggtacttgtgaagagcctgcagagcaaggatgagcagcagcagctggacttccggagggagttggagatgtttgggaagctgaaccacgccaacgtggtgcggctcctggggctgtgccgggaggctgagccccactacatggtgctggaatatgtggatctgggagacctcaagcagttcctgaggatttccaagagcaaggatgaaaaattgaagtcacagcccctcagcaccaagcagaaggtggccctatgcacccaggtagccctgggcatggagcacctgtccaacaaccgctttgtgcataaggacttggctgcgcgtaactgcctggtcagtgcccagagacaagtgaaggtgtctgccctgggcctcagcaaggatgtgtacaacagtgagtactaccacttccgccaggcctgggtgccgctgcgctggatgtcccccgaggccatcctggagggtgacttctctaccaagtctgatgtctgggccttcggtgtgctgatgtgggaagtgtttacacatggagagatgccccatggtgggcaggcagatgatgaagtactggcagatttgcaggctgggaaggctagacttcctcagcccgagggctgcccttccaaactctatcggctgatgcagcgctgctgggccctcagccccaaggaccggccctccttcagtgagattgccagcgccctgggagacagcaccgtggacagcaagccgtgaggagggagcccgctcaggatggcctgggcaggggaggacatctctagagggaagctcacagcatgatgggcaagatccctgtcctcctgggccctgaggcccctgccctagtgcaacaggcattgctgaggtctgagcagggcctggcctttcctcctcttcctcaccctcatcctttgggaggctgacttggacccaaactgggcgactagggctttgagctgggcagttttccctgccacctcttcctctatcagggacagtgtgggtgccacaggtaaccccaatttctggccttcaacttctccccttgaccgggtccaactctgccactcatctgccaactttgcctggggagggctaggcttgggatgagctgggtttgtggggagttccttaatattctcaagttctgggcacacagggttaatgagtctcttggcccactggtcccacttgggggtctagaccaggattatagaggacacagcaagtgagtcctccccactctgggcttgtgcacactgacccagacccacgtcttccccacccttctctcctttcctcatcctaagtgcctggcagatgaaggagttttcaggagcttttgacactatataaaccgccctttttgtatgcaccacgggcggcttttatatgtaattgcagcgtggggtgggtgggcatgggaggtaggggtgggccctggagatgaggagggtgggccatccttaccccacacttttattgttgtcgttttttgtttgttttgtttttttgtttttgtttttgtttttacactcgctgctctcaataaataagccttttttacaacctg

SEQ ID NO: 1085 - DNA, 6206 bp, Homo sapiens
ggcggcggcggcggcgcgcggggactcggaggtactgggcgcgcgcggctccggctcgggacgcctcgggacgcctcggggtcgggctccggctgcggctgctgctgcggcgcccgcgctccggtgcgctccgcctcctgtgcccgccgcggagcgcagtctgcgcgcccgccgtgcgccctcagctccttttcctgagcccgccgcgatgggagctgcgcggggatccccggccagaccccgccggttgcctctgctcagcgtcctgctgctgccgctgctgggcggtacccagacagccattgtcttcatcaagcagccgtcctcccaggatgcactgcaggggcgccgggcgctgcttcgctgtgaggttgaggctccgggcccggtacatgtgtactggctgctcgatggggcccctgtccaggacacggagcggcgtttcgcccagggcagcagcctgagctttgcagctgtggaccggctgcaggactctggcaccttccagtgtgtggctcgggatgatgtcactggagaagaagcccgcagtgccaacgcctccttcaacatcaaatggattgaggcaggtcctgtggtcctgaagcatccagcctcggaagctgagatccagccacagacccaggtcacacttcgttgccacattgatgggcaccctcggcccacctaccaatggttccgagatgggacccccctttctgatggtcagagcaaccacacagtcagcagcaaggagcggaacctgacgctccggccagctggtcctgagcatagtgggctgtattcctgctgcgcccacagtgcttttggccaggcttgcagcagccagaacttcaccttgagcattgctgatgaaagctttgccagggtggtgctggcaccccaggacgtggtagtagcgaggtatgaggaggccatgttccattgccagttctcagcccagccacccccgagcctgcagtggctctttgaggatgagactcccatcactaaccgcagtcgccccccacacctccgcagagccacagtgtttgccaacgggtctctgctgctgacccaggtccggccacgcaatgcagggatctaccgctgcattggccaggggcagaggggcccacccatcatcctggaagccacacttcacctagcagagattgaagacatgccgctatttgagccacgggtgtttacagctggcagcgaggagcgtgtgacctgccttccccccaagggtctgccagagcccagcgtgtggtgggagcacgcgggagtccggctgcccacccatggcagggtctaccagaagggccacgagctggtgttggccaatattgctgaaagtgatgctggtgtctacacctgccacgcggccaacctggctggtcagcggagacaggatgtcaacatcactgtggccactgtgccctcctggctgaagaagccccaagacagccagctggaggagggcaaacccggctacttggattgcctgacccaggccacaccaaaacctacagttgtctggtacagaaaccagatgctcatctcagaggactcacggttcgaggtcttcaagaatgggaccttgcgcatcaacagcgtggaggtgtatgatgggacatggtaccgttgtatgagcagcaccccagccggcagcatcgaggcgcaagcccgtgtccaagtgctggaaaagctcaagttcacaccaccaccccagccacagcagtgcatggagtttgacaaggaggccacggtgccctgttcagccacaggccgagagaagcccactattaagtgggaacgggcagatgggagcagcctcccagagtgggtgacagacaacgctgggaccctgcattttgcccgggtgactcgagatgacgctggcaactacacttgcattgcctccaacgggccgcagggccagattcgtgcccatgtccagctcactgtggcagtttttatcaccttcaaagtggaaccagagcgtacgactgtgtaccagggccacacagccctactgcagtgcgaggcccagggggaccccaagccgctgattcagtggaaaggcaaggaccgcatcctggaccccaccaagctgggacccaggatgcacatcttccagaatggctccctggtgatccatgacgtggcccctgaggactcaggccgctacacctgcattgcaggcaacagctgcaacatcaagcacacggaggcccccctctatgtcgtgggtatgggctggggagggttatgctgcacaggaagtggtgggcccagacgtttgtcaccttgtactcagcccctgtgtacagaacatggcacagaagccatttttgtggcagcggtggggattcggccgtctcaccatgctgctgcacagtcttagagtccttgctcagagccgggctgtcgtttatttaacatccaacggtcggtgtgtgtgtgtgtgtgttgtgggggagtgggggggtgttctcttcctacaatgctgcctcccaggttcctgcagcagccacacatatctctgggtggctggggaggaggaccaggtcagaatgcagtaggacaaggttcttttctccaggaggcccagagaggatgatgggtcaggtaaaaggccctgcacttaactctctgcccctgggagacttatttctcctctggggacttgtttctgcatccacaggtgaaagtggtttaaatgagaagctcttaaactttcttggtttggcagcagagttatttttctagacaaagtataatgtgaaagtttaaatggatgaaaatgaactgaggaggcccccttggtgggagccactggggtgtgtgtggcagttgggggatcctgcatggtctcccttcattcccctaatgcctcttgaggcccctcagtgtgggccattaaaaggcccctagaccagcagatcccttctacagatctgcttattgaaaaacctgctctgtgccaggcagtgcctggaattctaaacctgaagctcccaaatgctgctctccggggcctggctcacattatcaagtcacttgggaagcttaacaaataacgtgggtttgtggtagctccttgacaggtgtgcttatccgtgtcgcctgtcttggcttccgatgcaaagccagcttgggaacccctggcctcatctccttcagagtcttcgtttgaccttggtggggcatgaggacctgctggcccttgttaaagccagtgaaggtggtgaccctcccgggccatctgttaagttgccctgttgatggggttgggaggagttagtagagaagcagggcttcttttgcttagcagcccctgcccagacccatctgtgtgtctctcagacaagcctgtgccggaggagtcggagggccctggcagccctcccccctacaagatgatccagaccattgggttgtcggtgggtgccgctgtggcctacatcattgccgtgctgggcctcatgttctactgcaagaagcgctgcaaagccaagcggctgcagaagcagcccgagggcgaggagccagagatggaatgcctcaacggtgaggggccctggacggggaggtggtgcccgtgtgcgggagctgagcgccctcccgcggccacggaggggagagcgccagcactctggaaaccgagcggctgttgctgggtcctggagctgggactgccccacccctagcgggaagcctggagttggattcccagggcctcgtcttctgagcaacctggcttgagacttcttcattggagccccttggaccagcttcctatgattccctgctgtttcctcctcccagcacaaaaccacagatatcattagtatatgtacacacgttgctgttgcatgtcttgtctccctctatgagtctaagagctcccccaggggcagtctttctgtttacttcccttctcctatccccacttcctggactgggagctccttgaggtcattgctgggtctctcctatcagctcaggtgttcaggagcagaggttgggtctccattattgtgattttccctttgtgcctgtttagggctttgcccaataggaggccccatgaaagcaaaaatccttatgtgtagctatggtattaaggaccagtgattcagattagatgtctgcagttggcttcatctcagaggtcataatcagctgcatcactaaggggtcataccctaggggatagccatacatcccccacccagccccagccccattatttcatcatttgggcttgccctttcatgtggagcactgtgattggacccaagttggcaagagtggaagaccaggggacagaacagaaatccccatggtggccagagtgtcaggtctcatcgtgacgctcttgtcctcctccttcccaggtgggcctttgcagaacgggcagccctcagcagagatccaagaagaagtggccttgaccagcttgggctccggccccgcggccaccaacaaacgccacagcacaagtgataagatgcacttcccacggtctagcctgcagcccatcaccacgctggggaagagtgagtttggggaggtgttcctggcaaaggctcagggcttggaggagggagtggcagagaccctggtacttgtgaagagcctgcagagcaaggatgagcagcagcagctggacttccggagggagttggagatgtttgggaagctgaaccacgccaacgtggtgcggctcctggggctgtgccgggaggctgagccccactacatggtgctggaatatgtggatctgggagacctcaagcagttcctgaggatttccaagagcaaggatgaaaaattgaagtcacagcccctcagcaccaagcagaaggtggccctatgcacccaggtagccctgggcatggagcacctgtccaacaaccgctttgtgcataaggacttggctgcgcgtaactgcctggtcagtgcccagagacaagtgaaggtgtctgccctgggcctcagcaaggatgtgtacaacagtgagtactaccacttccgccaggcctgggtgccgctgcgctggatgtcccccgaggccatcctggagggtgacttctctaccaagtctgatgtctgggccttcggtgtgctgatgtgggaagtgtttacacatggagagatgccccatggtgggcaggcagatgatgaagtactggcagatttgcaggctgggaaggctagacttcctcagcccgagggctgcccttccaaactctatcggctgatgcagcgctgctgggccctcagccccaaggaccggccctccttcagtgagattgccagcgccctgggagacagcaccgtggacagcaagccgtgaggagggagcccgctcaggatggcctgggcaggggaggacatctctagagggaagctcacagcatgatgggcaagatccctgtcctcctgggccctgaggcccctgccctagtgcaacaggcattgctgaggtctgagcagggcctggcctttcctcctcttcctcaccctcatcctttgggaggctgacttggacccaaactgggcgactagggctttgagctgggcagttttccctgccacctcttcctctatcagggacagtgtgggtgccacaggtaaccccaatttctggccttcaacttctccccttgaccgggtccaactctgccactcatctgccaactttgcctggggagggctaggcttgggatgagctgggtttgtggggagttccttaatattctcaagttctgggcacacagggttaatgagtctcttggcccactggtcccacttgggggtctagaccaggattatagaggacacagcaagtgagtcctccccactctgggcttgtgcacactgacccagacccacgtcttccccacccttctctcctttcctcatcctaagtgcctggcagatgaaggagttttcaggagcttttgacactatataaaccgccctttttgtatgcaccacgggcggcttttatatgtaattgcagcgtggggtgggtgggcatgggaggtaggggtgggccctggagatgaggagggtgggccatccttaccccacacttttattgttgtcgttttttgtttgttttgtttttttgtttttgtttttgtttttacactcgctgctctcaataaataagccttttttacaacctg

SEQ ID NO: 1086 - DNA, 5973 bp, Homo sapiens
ggcggcggcggcggcgcgcggggactcggaggtactgggcgcgcgcggctccggctcgggacgcctcgggacgcctcggggtcgggctccggctgcggctgctgctgcggcgcccgcgctccggtgcgctccgcctcctgtgcccgccgcggagcgcagtctgcgcgcccgccgtgcgccctcagctccttttcctgagcccgccgcgatgggagctgcgcggggatccccggccagaccccgccggttgcctctgctcagcgtcctgctgctgccgctgctgggcggtacccagacagccattgtcttcatcaagcagccgtcctcccaggatgcactgcaggggcgccgggcgctgcttcgctgtgaggttgaggctccgggcccggtacatgtgtactggctgctcgatggggcccctgtccaggacacggagcggcgtttcgcccagggcagcagcctgagctttgcagctgtggaccggctgcaggactctggcaccttccagtgtgtggctcgggatgatgtcactggagaagaagcccgcagtgccaacgcctccttcaacatcaaatggattgaggcaggtcctgtggtcctgaagcatccagcctcggaagctgagatccagccacagacccaggtcacacttcgttgccacattgatgggcaccctcggcccacctaccaatggttccgagatgggacccccctttctgatggtcagagcaaccacacagtcagcagcaaggagcggaacctgacgctccggccagctggtcctgagcatagtgggctgtattcctgctgcgcccacagtgcttttggccaggcttgcagcagccagaacttcaccttgagcattgctgatgaaagctttgccagggtggtgctggcaccccaggacgtggtagtagcgaggtatgaggaggccatgttccattgccagttctcagcccagccacccccgagcctgcagtggctctttgaggatgagactcccatcactaaccgcagtcgccccccacacctccgcagagccacagtgtttgccaacgggtctctgctgctgacccaggtccggccacgcaatgcagggatctaccgctgcattggccaggggcagaggggcccacccatcatcctggaagccacacttcacctagcagagattgaagacatgccgctatttgagccacgggtgtttacagctggcagcgaggagcgtgtgacctgccttccccccaagggtctgccagagcccagcgtgtggtgggagcacgcgggagtccggctgcccacccatggcagggtctaccagaagggccacgagctggtgttggccaatattgctgaaagtgatgctggtgtctacacctgccacgcggccaacctggctggtcagcggagacaggatgtcaacatcactgtggccactgtgccctcctggctgaagaagccccaagacagccagctggaggagggcaaacccggctacttggattgcctgacccaggccacaccaaaacctacagttgtctggtacagaaaccagatgctcatctcagaggactcacggttcgaggtcttcaagaatgggaccttgcgcatcaacagcgtggaggtgtatgatgggacatggtaccgttgtatgagcagcaccccagccggcagcatcgaggcgcaagcccgtgtccaagtgctggaaaagctcaagttcacaccaccaccccagccacagcagtgcatggagtttgacaaggaggccacggtgccctgttcagccacaggccgagagaagcccactattaagtgggaacgggcagatgggagcagcctcccagagtgggtgacagacaacgctgggaccctgcattttgcccgggtgactcgagatgacgctggcaactacacttgcattgcctccaacgggccgcagggccagattcgtgcccatgtccagctcactgtggcagtttttatcaccttcaaagtggaaccagagcgtacgactgtgtaccagggccacacagccctactgcagtgcgaggcccagggggaccccaagccgctgattcagtggaaaggcaaggaccgcatcctggaccccaccaagctgggacccaggatgcacatcttccagaatggctccctggtgatccatgacgtggcccctgaggactcaggccgctacacctgcattgcaggcaacagctgcaacatcaagcacacggaggcccccctctatgtcgtgggtatgggctggggagggttatgctgcacaggaagtggtgggcccagacgtttgtcaccttgtactcagcccctgtgtacagaacatggcacagaagccatttttgtggcagcggtggggattcggccgtctcaccatgctgctgcacagtcttagagtccttgctcagagccgggctgtcgtttatttaacatccaacggtcggtgtgtgtgtgtgtgtgttgtgggggagtgggggggtgttctcttcctacaatgctgcctcccaggttcctgcagcagccacacatatctctgggtggctggggaggaggaccaggtcagaatgcagtaggacaaggttcttttctccaggaggcccagagaggatgatgggtcaggtaaaaggccctgcacttaactctctgcccctgggagacttatttctcctctggggacttgtttctgcatccacaggtgaaagtggtttaaatgagaagctcttaaactttcttggtttggcagcagagttatttttctagacaaagtataatgtgaaagtttaaatggatgaaaatgaactgaggaggcccccttggtgggagccactggggtgtgtgtggcagttgggggatcctgcatggtctcccttcattcccctaatgcctcttgaggcccctcagtgtgggccattaaaaggcccctagaccagcagatcccttctacagatctgcttattgaaaaacctgctctgtgccaggcagtgcctggaattctaaacctgaagctcccaaatgctgctctccggggcctggctcacattatcaagtcacttgggaagcttaacaaataacgtgggtttgtggtagctccttgacaggtgtgcttatccgtgtcgcctgtcttggcttccgatgcaaagccagcttgggaacccctggcctcatctccttcagagtcttcgtttgaccttggtggggcatgaggacctgctggcccttgttaaagccagtgaaggtggtgaccctcccgggccatctgttaagttgccctgttgatggggttgggaggagttagtagagaagcagggcttcttttgcttagcagcccctgcccagacccatctgtgtgtctctcagacaagcctgtgccggaggagtcggagggccctggcagccctcccccctacaagatgatccagaccattgggttgtcggtgggtgccgctgtggcctacatcattgccgtgctgggcctcatgttctactgcaagaagcgctgcaaagccaagcggctgcagaagcagcccgagggcgaggagccagagatggaatgcctcaacggtgaggggccctggacggggaggtggtgcccgtgtgcgggagctgagcgccctcccgcggccacggaggggagagcgccagcactctggaaaccgagcggctgttgctgggtcctggagctgggactgccccacccctagcgggaagcctggagttggattcccagggcctcgtcttctgagcaacctggcttgagacttcttcattggagccccttggaccagcttcctatgattccctgctgtttcctcctcccagcacaaaaccacagatatcattagtatatgtacacacgttgctgttgcatgtcttgtctccctctatgagtctaagagctcccccaggggcagtctttctgtttacttcccttctcctatccccacttcctggactgggagctccttgaggtcattgctgggtctctcctatcagctcaggtgttcaggagcagaggttgggtctccattattgtgattttccctttgtgcctgtttagggctttgcccaataggaggccccatgaaagcaaaaatccttatgtgtagctatggtattaaggaccagtgattcagattagatgtctgcagttggcttcatctcagaggtcataatcagctgcatcactaaggggtcataccctaggggatagccatacatcccccacccagccccagccccattatttcatcatttgggcttgccctttcatgtggagcactgtgattggacccaagttggcaagagtggaagaccaggggacagaacagaaatccccatggtggccagagtgtcaggtctcatcgtgacgctcttgtcctcctccttcccaggtgggcctttgcagaacgggcagccctcagcagagatccaagaagaagtggccttgaccagcttgggctccggccccgcggccaccaacaaacgccacagcacaagtgataagatgcacttcccacggtctagcctgcagcccatcaccacgctggggagacctcaagcagttcctgaggatttccaagagcaaggatgaaaaattgaagtcacagcccctcagcaccaagcagaaggtggccctatgcacccaggtagccctgggcatggagcacctgtccaacaaccgctttgtgcataaggacttggctgcgcgtaactgcctggtcagtgcccagagacaagtgaaggtgtctgccctgggcctcagcaaggatgtgtacaacagtgagtactaccacttccgccaggcctgggtgccgctgcgctggatgtcccccgaggccatcctggagggtgacttctctaccaagtctgatgtctgggccttcggtgtgctgatgtgggaagtgtttacacatggagagatgccccatggtgggcaggcagatgatgaagtactggcagatttgcaggctgggaaggctagacttcctcagcccgagggctgcccttccaaactctatcggctgatgcagcgctgctgggccctcagccccaaggaccggccctccttcagtgagattgccagcgccctgggagacagcaccgtggacagcaagccgtgaggagggagcccgctcaggatggcctgggcaggggaggacatctctagagggaagctcacagcatgatgggcaagatccctgtcctcctgggccctgaggcccctgccctagtgcaacaggcattgctgaggtctgagcagggcctggcctttcctcctcttcctcaccctcatcctttgggaggctgacttggacccaaactgggcgactagggctttgagctgggcagttttccctgccacctcttcctctatcagggacagtgtgggtgccacaggtaaccccaatttctggccttcaacttctccccttgaccgggtccaactctgccactcatctgccaactttgcctggggagggctaggcttgggatgagctgggtttgtggggagttccttaatattctcaagttctgggcacacagggttaatgagtctcttggcccactggtcccacttgggggtctagaccaggattatagaggacacagcaagtgagtcctccccactctgggcttgtgcacactgacccagacccacgtcttccccacccttctctcctttcctcatcctaagtgcctggcagatgaaggagttttcaggagcttttgacactatataaaccgccctttttgtatgcaccacgggcggcttttatatgtaattgcagcgtggggtgggtgggcatgggaggtaggggtgggccctggagatgaggagggtgggccatccttaccccacacttttattgttgtcgttttttgtttgttttgtttttttgtttttgtttttgtttttacactcgctgctctcaataaataagccttttttacaacctg

SEQ ID NO: 1087 - DNA, 4811 bp, Homo sapiens
ggcggcggcggcggcgcgcggggactcggaggtactgggcgcgcgcggctccggctcgggacgcctcgggacgcctcggggtcgggctccggctgcggctgctgctgcggcgcccgcgctccggtgcgctccgcctcctgtgcccgccgcggagcgcagtctgcgcgcccgccgtgcgccctcagctccttttcctgagcccgccgcgatgggagctgcgcggggatccccggccagaccccgccggttgcctctgctcagcgtcctgctgctgccgctgctgggcggtacccagacagccattgtcttcatcaagcagccgtcctcccaggatgcactgcaggggcgccgggcgctgcttcgctgtgaggttgaggctccgggcccggtacatgtgtactggctgctcgatggggcccctgtccaggacacggagcggcgtttcgcccagggcagcagcctgagctttgcagctgtggaccggctgcaggactctggcaccttccagtgtgtggctcgggatgatgtcactggagaagaagcccgcagtgccaacgcctccttcaacatcaaatggattgaggcaggtcctgtggtcctgaagcatccagcctcggaagctgagatccagccacagacccaggtcacacttcgttgccacattgatgggcaccctcggcccacctaccaatggttccgagatgggacccccctttctgatggtcagagcaaccacacagtcagcagcaaggagcggaacctgacgctccggccagctggtcctgagcatagtgggctgtattcctgctgcgcccacagtgcttttggccaggcttgcagcagccagaacttcaccttgagcattgctgatgaaagctttgccagggtggtgctggcaccccaggacgtggtagtagcgaggtatgaggaggccatgttccattgccagttctcagcccagccacccccgagcctgcagtggctctttgaggatgagactcccatcactaaccgcagtcgccccccacacctccgcagagccacagtgtttgccaacgggtctctgctgctgacccaggtccggccacgcaatgcagggatctaccgctgcattggccaggggcagaggggcccacccatcatcctggaagccacacttcacctagcagagattgaagacatgccgctatttgagccacgggtgtttacagctggcagcgaggagcgtgtgacctgccttccccccaagggtctgccagagcccagcgtgtggtgggagcacgcgggagtccggctgcccacccatggcagggtctaccagaagggccacgagctggtgttggccaatattgctgaaagtgatgctggtgtctacacctgccacgcggccaacctggctggtcagcggagacaggatgtcaacatcactgtggccactgtgccctcctggctgaagaagccccaagacagccagctggaggagggcaaacccggctacttggattgcctgacccaggccacaccaaaacctacagttgtctggtacagaaaccagatgctcatctcagaggactcacggttcgaggtcttcaagaatgggaccttgcgcatcaacagcgtggaggtgtatgatgggacatggtaccgttgtatgagcagcaccccagccggcagcatcgaggcgcaagcccgtgtccaagtgctggaaaagctcaagttcacaccaccaccccagccacagcagtgcatggagtttgacaaggaggccacggtgccctgttcagccacaggccgagagaagcccactattaagtgggaacgggcagatgggagcagcctcccagagtgggtgacagacaacgctgggaccctgcattttgcccgggtgactcgagatgacgctggcaactacacttgcattgcctccaacgggccgcagggccagattcgtgcccatgtccagctcactgtggcagtttttatcaccttcaaagtggaaccagagcgtacgactgtgtaccagggccacacagccctactgcagtgcgaggcccagggggaccccaagccgctgattcagtggaaaggcaaggaccgcatcctggaccccaccaagctgggacccaggatgcacatcttccagaatggctccctggtgatccatgacgtggcccctgaggactcaggccgctacacctgcattgcaggcaacagctgcaacatcaagcacacggaggcccccctctatgtcgtgggtatgggctggggagggttatgctgcacaggaagtggtgggcccagacgtttgtcaccttgtactcagcccctgtgtacagaacatggcacagaagccatttttgtggcagcggtggggattcggccgtctcaccatgctgctgcacagtcttagagtccttgctcagagccgggctgtcgtttatttaacatccaacggtcggtgtgtgtgtgtgtgtgttgtgggggagtgggggggtgttctcttcctacaatgctgcctcccaggttcctgcagcagccacacatatctctgggtggctggggaggaggaccaggtcagaatgcagtaggacaaggttcttttctccaggaggcccagagaggatgatgggtcaggtaaaaggccctgcacttaactctctgcccctgggagacttatttctcctctggggacttgtttctgcatccacaggtgaaagtggtttaaatgagaagctcttaaactttcttggtttggcagcagagttatttttctagacaaagtataatgtgaaagtttaaatggatgaaaatgaactgaggaggcccccttggtgggagccactggggtgtgtgtggcagttgggggatcctgcatggtctcccttcattcccctaatgcctcttgaggcccctcagtgtgggccattaaaaggcccctagaccagcagatcccttctacagatctgcttattgaaaaacctgctctgtgccaggcagtgcctggaattctaaacctgaagctcccaaatgctgctctccggggcctggctcacattatcaagtcacttgggaagcttaacaaataacgtgggtttgtggtagctccttgacaggtgtgcttatccgtgtcgcctgtcttggcttccgatgcaaagccagcttgggaacccctggcctcatctccttcagagtcttcgtttgaccttggtggggcatgaggacctgctggcccttgttaaagccagtgaaggtggtgaccctcccgggccatctgttaagttgccctgttgatggggttgggaggagttagtagagaagcagggcttcttttgcttagcagcccctgcccagacccatctgtgtgtctctcagacaagcctgtgccggaggagtcggagggccctggcagccctcccccctacaagatgatccagaccattgggttgtcggtgggtgccgctgtggcctacatcattgccgtgctgggcctcatgttctactgcaagaagcgctgcaaagccaagcggctgcagaagcagcccgagggcgaggagccagagatggaatgcctcaacggtgaggggccctggacggggaggtggtgcccgtgtgcgggagctgagcgccctcccgcggccacggaggggagagcgccagcactctggaaaccgagcggctgttgctgggtcctggagctgggactgccccacccctagcgggaagcctggagttggattcccagggcctcgtcttctgagcaacctggcttgagacttcttcattggagccccttggaccagcttcctatgattccctgctgtttcctcctcccagcacaaaaccacagatatcattagtatatgtacacacgttgctgttgcatgtcttgtctccctctatgagtctaagagctcccccaggggcagtctttctgtttacttcccttctcctatccccacttcctggactgggagctccttgaggtcattgctgggtctctcctatcagctcaggtgttcaggagcagaggttgggtctccattattgtgattttccctttgtgcctgtttagggctttgcccaataggaggccccatgaaagcaaaaatccttatgtgtagctatggtattaaggaccagtgattcagattagatgtctgcagttggcttcatctcagaggtcataatcagctgcatcactaaggggtcataccctaggggatagccatacatcccccacccagccccagccccattatttcatcatttgggcttgccctttcatgtggagcactgtgattggacccaagttggcaagagtggaagaccaggggacagaacagaaatccccatggtggccagagtgtcaggtctcatcgtgacgctcttgtcctcctccttcccaggtgggcctttgcagaacgggcagccctcagcagagatccaagaagaagtggccttgaccagcttgggctccggccccgcggccaccaacaaacgccacagcacaagtgataagatgcacttcccacggtctagcctgcagcccatcaccacgctgggtatgttgccttgactacagctgcccctgcctaactacaagtcacccgctgtgtcttgaggctgggtacgggctagtgttctgaagtccctgaaacctagaatgttagaggtggagggaagcataggtagagatctagcccagtgtggccccagagcctgttattcactgcccttcgtgcagattttgtcattcctgtgtactacctgtagtattatttacttgatgttttatttaaattgactcttta

SEQ ID NO: 1088 - DNA, 2946 bp, Homo sapiens
ggcggcggcggcggcgcgcggggactcggaggtactgggcgcgcgcggctccggctcgggacgcctcgggacgcctcggggtcgggctccggctgcggctgctgctgcggcgcccgcgctccggtgcgctccgcctcctgtgcccgccgcggagcgcagtctgcgcgcccgccgtgcgccctcagctccttttcctgagcccgccgcgatgggagctgcgcggggatccccggccagaccccgccggttgcctctgctcagcgtcctgctgctgccgctgctgggcggtacccagacagccattgtcttcatcaagcagccgtcctcccaggatgcactgcaggggcgccgggcgctgcttcgctgtgaggttgaggctccgggcccggtacatgtgtactggctgctcgatggggcccctgtccaggacacggagcggcgtttcgcccagggcagcagcctgagctttgcagctgtggaccggctgcaggactctggcaccttccagtgtgtggctcgggatgatgtcactggagaagaagcccgcagtgccaacgcctccttcaacatcaaatggattgaggcaggtcctgtggtcctgaagcatccagcctcggaagctgagatccagccacagacccaggtcacacttcgttgccacattgatgggcaccctcggcccacctaccaatggttccgagatgggacccccctttctgatggtcagagcaaccacacagtcagcagcaaggagcggaacctgacgctccggccagctggtcctgagcatagtgggctgtattcctgctgcgcccacagtgcttttggccaggcttgcagcagccagaacttcaccttgagcattgctgatgaaagctttgccagggtggtgctggcaccccaggacgtggtagtagcgaggtatgaggaggccatgttccattgccagttctcagcccagccacccccgagcctgcagtggctctttgaggatgagactcccatcactaaccgcagtcgccccccacacctccgcagagccacagtgtttgccaacgggtctctgctgctgacccaggtccggccacgcaatgcagggatctaccgctgcattggccaggggcagaggggcccacccatcatcctggaagccacacttcacctagcagagattgaagacatgccgctatttgagccacgggtgtttacagctggcagcgaggagcgtgtgacctgccttccccccaagggtctgccagagcccagcgtgtggtgggagcacgcgggagtccggctgcccacccatggcagggtctaccagaagggccacgagctggtgttggccaatattgctgaaagtgatgctggtgtctacacctgccacgcggccaacctggctggtcagcggagacaggatgtcaacatcactgtggccactgtgccctcctggctgaagaagccccaagacagccagctggaggagggcaaacccggctacttggattgcctgacccaggccacaccaaaacctacagttgtctggtacagaaaccagatgctcatctcagaggactcacggttcgaggtcttcaagaatgggaccttgcgcatcaacagcgtggaggtgtatgatgggacatggtaccgttgtatgagcagcaccccagccggcagcatcgaggcgcaagcccgtgtccaagtgctggaaaagctcaagttcacaccaccaccccagccacagcagtgcatggagtttgacaaggaggccacggtgccctgttcagccacaggccgagagaagcccactattaagtgggaacgggcagatgggagcagcctcccagagtgggtgacagacaacgctgggaccctgcattttgcccgggtgactcgagatgacgctggcaactacacttgcattgcctccaacgggccgcagggccagattcgtgcccatgtccagctcactgtggcagtttttatcaccttcaaagtggaaccagagcgtacgactgtgtaccagggccacacagccctactgcagtgcgaggcccagggggaccccaagccgctgattcagtggaaaggcaaggaccgcatcctggaccccaccaagctgggacccaggatgcacatcttccagaatggctccctggtgatccatgacgtggcccctgaggactcaggccgctacacctgcattgcaggcaacagctgcaacatcaagcacacggaggcccccctctatgtcgtgggtatgggctggggagggttatgctgcacaggaagtggtgggcccagacgtttgtcaccttgtactcagcccctgtgtacagaacatggcacagaagccatttttgtggcagcggtggggattcggccgtctcaccatgctgctgcacagtcttagagtccttgctcagagccgggctgtcgtttatttaacatccaacggtcggtgtgtgtgtgtgtgtgttgtgggggagtgggggggtgttctcttcctacaatgctgcctcccaggttcctgcagcagccacacatatctctgggtggctggggaggaggaccaggtcagaatgcagtaggacaaggttcttttctccaggaggcccagagaggatgatgggtcaggtaaaaggccctgcacttaactctctgcccctgggagacttatttctcctctggggacttgtttctgcatccacaggtgaaagtggtttaaatgagaaggcggcccgcttggctggtggggcccgcggcgggattttcccgggcggcgagagcggatctatcttgggatcccatggctttctttactgggctctggggccccttcacctgtgtaagcagagtgctgagccatcactgtttcagcaccactgggagtctgagtgcgattcagaagatgacgcgggtacgagtggtggacaacagtgccctggg

SEQ ID NO: 1089 - DNA, 2469 bp, Homo sapiens
ggcggcggcggcggcgcgcggggactcggaggtactgggcgcgcgcggctccggctcgggacgcctcgggacgcctcggggtcgggctccggctgcggctgctgctgcggcgcccgcgctccggtgcgctccgcctcctgtgcccgccgcggagcgcagtctgcgcgcccgccgtgcgccctcagctccttttcctgagcccgccgcgatgggagctgcgcggggatccccggccagaccccgccggttgcctctgctcagcgtcctgctgctgccgctgctgggcggtacccagacagccattgtcttcatcaagcagccgtcctcccaggatgcactgcaggggcgccgggcgctgcttcgctgtgaggttgaggctccgggcccggtacatgtgtactggctgctcgatggggcccctgtccaggacacggagcggcgtttcgcccagggcagcagcctgagctttgcagctgtggaccggctgcaggactctggcaccttccagtgtgtggctcgggatgatgtcactggagaagaagcccgcagtgccaacgcctccttcaacatcaaatggattgaggcaggtcctgtggtcctgaagcatccagcctcggaagctgagatccagccacagacccaggtcacacttcgttgccacattgatgggcaccctcggcccacctaccaatggttccgagatgggacccccctttctgatggtcagagcaaccacacagtcagcagcaaggagcggaacctgacgctccggccagctggtcctgagcatagtgggctgtattcctgctgcgcccacagtgcttttggccaggcttgcagcagccagaacttcaccttgagcattgctgatgaaagctttgccagggtggtgctggcaccccaggacgtggtagtagcgaggtatgaggaggccatgttccattgccagttctcagcccagccacccccgagcctgcagtggctctttgaggatgagactcccatcactaaccgcagtcgccccccacacctccgcagagccacagtgtttgccaacgggtctctgctgctgacccaggtccggccacgcaatgcagggatctaccgctgcattggccaggggcagaggggcccacccatcatcctggaagccacacttcacctagcagagattgaagacatgccgctatttgagccacgggtgtttacagctggcagcgaggagcgtgtgacctgccttccccccaagggtctgccagagcccagcgtgtggtgggagcacgcgggagtccggctgcccacccatggcagggtctaccagaagggccacgagctggtgttggccaatattgctgaaagtgatgctggtgtctacacctgccacgcggccaacctggctggtcagcggagacaggatgtcaacatcactgtggccagtgagcacctttgccctgaaggtcaaggagaggtggaggggaacacaggtctgggtgtgatggacagaggcttccctggtactcacctgaggtcctctcagttctgggccctgcaggcttgggaatcagttcactactgggagtcggtgtagacagtagagagccaggcacaggggttagggtgggtgctccagaggaaatagtgacagccctcacagaaaaatggtcctctgggtacagaggaaagagcaatagactaggaatctagagacctgggtcccactatgctcccaatgcacagagtgacgatggtagcaaatcacccaccttactggggttcagtctcctcatccataaaatggagccagtaatctactacctaccccacaaggtggttggaaaggtcaaatgaagtagatgaaaatgatttttctttttttcttttttgggaggtaatagtggacaaaattataggtgatttttaatttgttttagtttgttatgctttccaaatttctttactaaacatattacttatgaaaaaaaagagggggagaaaagcaagacatatgactgaaagtacacatgataaaccctttatatcaggctgggcgcggtggctcatgcctgtaatcccagcactttgggaggccgagccgggcggatcacaaggtcaggagttggagaccagcctgaccaacatggtgaaaccccatctctactaaaaatacaaaaattagctgggcgtggtggggcacacctgtaatcccagctactcaggaggctgagggaggaaaattgcttgaacccaggaggcagaggttgcaatgagctgagatcgcaccgttgctcttcagcccgggcaacagagtgagactccatctcaaaacaaaacaaaacaaaccttatatcctcactacaggcatagggatttatttgtttacttatttctttataccatgccttgttccaaaccttttgtggtagtttaaaaggatacacaataaaaattacaatatgcacacagagacac

SEQ ID NO: 1090 - DNA, 2799 bp, Homo sapiens
ggcggcggcggcggcgcgcggggactcggaggtactgggcgcgcgcggctccggctcgggacgcctcgggacgcctcggggtcgggctccggctgcggctgctgctgcggcgcccgcgctccggtgcgctccgcctcctgtgcccgccgcggagcgcagtctgcgcgcccgccgtgcgccctcagctccttttcctgagcccgccgcgatgggagctgcgcggggatccccggccagaccccgccggttgcctctgctcagcgtcctgctgctgccgctgctgggcggtacccagacagccattgtcttcatcaagcagccgtcctcccaggatgcactgcaggggcgccgggcgctgcttcgctgtgaggttgaggctccgggcccggtacatgtgtactggctgctcgatggggcccctgtccaggacacggagcggcgtttcgcccagggcagcagcctgagctttgcagctgtggaccggctgcaggactctggcaccttccagtgtgtggctcgggatgatgtcactggagaagaagcccgcagtgccaacgcctccttcaacatcaaatggattgaggcaggtcctgtggtcctgaagcatccagcctcggaagctgagatccagccacagacccaggtcacacttcgttgccacattgatgggcaccctcggcccacctaccaatggttccgagatgggacccccctttctgatggtcagagcaaccacacagtcagcagcaaggagcggaacctgacgctccggccagctggtcctgagcatagtgggctgtattcctgctgcgcccacagtgcttttggccaggcttgcagcagccagaacttcaccttgagcattgctgatgaaagctttgccagggtggtgctggcaccccaggacgtggtagtagcgaggtatgaggaggccatgttccattgccagttctcagcccagccacccccgagcctgcagtggctctttgaggatgagactcccatcactaaccgcagtcgccccccacacctccgcagagccacagtgtttgccaacgggtctctgctgctgacccaggtccggccacgcaatgcagggatctaccgctgcattggccaggggcagaggggcccacccatcatcctggaagccacacttcacctagcagagattgaagacatgccgctatttgagccacgggtgtttacagctggcagcgaggagcgtgtgacctgccttccccccaagggtctgccagagcccagcgtgtggtgggagcacgcgggagtccggctgcccacccatggcagggtctaccagaagggccacgagctggtgttggccaatattgctgaaagtgatgctggtgtctacacctgccacgcggccaacctggctggtcagcggagacaggatgtcaacatcactgtggccagtgagcacctttgccctgaaggtcaaggagaggtggaggggaacacaggtctgggtgtgatggacagaggcttccctggtactcacctgaggtcctctcagttctgggccctgcaggcttgggaatcagttcactactgggagtcggtgtagacagtagagagccaggcacaggggttagggtgggtgctccagaggaaatagtgacagccctcacagaaaaatggtcctctgggtacagaggaaagagcaatagactaggaatctagagacctgggtcccactatgctcccaatgcacagagtgacgatggtagcaaatcacccaccttactggggttcagtctcctcatccataaaatggagccagtaatctactacctaccccacaaggtggttggaaaggtcaaatgaagtagatgaaaatgatttttctttttttcttttttgggaggtaatagtggacaaaattataggtgatttttaatttgttttagtttgttatgctttccaaatttctttactaaacatattacttatgaaaaaaaagagggggagaaaagcaagacatatgactgaaagtacacatgataaaccctttatatcaggctgggcgcggtggctcatgcctgtaatcccagcactttgggaggccgagccgggcggatcacaaggtcaggagttggagaccagcctgaccaacatggtgaaaccccatctctactaaaaatacaaaaattagctgggcgtggtggggcacacctgtaatcccagctactcaggaggctgagggaggaaaattgcttgaacccaggaggcagaggttgcaatgagctgagatcgcaccgttgctcttcagcccgggcaacagagtgagactccatctcaaaacaaaacaaaacaaaccttatatcctcactacaggcatagggatttatttgtttacttatttctttataccatgccttgttccaaaccttttgtggtagtttaaaaggatacacaataaaaattacaatatgcacacagagacacacatacatacaaactattttgcaatctgcttcttccacttacctttatgttactattatctttccgagtgggtaactttgcaaaaagatttgaatatgaaagtggctttgtaaatgtgaagttgtgatgctagtattcccattaggatactgaaatcttagaagacatgcacctatactcaggccgtgatttgggtgggaatcacagcacatgtgtaacgagtgctcaggacactcacagtgcaggtgcaaaggcaagatgcacagtcaagccttcctccagttgaggtctgagaatcacctgctttcattagggatactttttcttctt

SEQ ID NO: 1091 - DNA, 972 bp, Homo sapiens
ggcggcggcggcggcgcgcggggactcggaggtactgggcgcgcgcggctccggctcgggacgcctcgggacgcctcggggtcgggctccggctgcggctgctgctgcggcgcccgcgctccggtgcgctccgcctcctgtgcccgccgcggagcgcagtctgcgcgcccgccgtgcgccctcagctccttttcctgagcccgccgcgatgggagctgcgcggggatccccggccagaccccgccggttgcctctgctcagcgtcctgctgctgccgctgctgggcggtacccagacagccattgtcttcatcaagcagccgtcctcccaggatgcactgcaggggcgccgggcgctgcttcgctgtgaggttgaggctccgggcccggtacatgtgtactggctgctcgatggggcccctgtccaggacacggagcggcgtttcgcccagggcagcagcctgagctttgcagctgtggaccggctgcaggactctggcaccttccagtgtgtggctcgggatgatgtcactggagaagaagcccgcagtgccaacgcctccttcaacatcaaatgtgagagccaggggggctgtgcccagtccccctgtcagaccctcaatgactgaggcctgggggatccctcccttacctcagcttctcccatttccagttaaacgggccaggcagaatgcatttatcatcagctttttttgctcatgtggataagaggaaattaaaagttatattttttccaaaattttttccttcaagtctgggacccatttatctgctgcatgcttgtgcaaatggaaagggcggccgagcccttggccaagtgtcagacttgacctgccagggaccaggcaggcacttagtatctggtaactgtagccccagcctcagcctccagggcttccttgtgtctgttggcacagagcctcgaggttccacggcttcctgcttgtcctcc

SEQ ID NO: 1092 - DNA, 4229 bp, Homo sapiens
ggcggcggcggcggcgcgcggggactcggaggtactgggcgcgcgcggctccggctcgggacgcctcgggacgcctcggggtcgggctccggctgcggctgctgctgcggcgcccgcgctccggtgcgctccgcctcctgtgcccgccgcggagcgcagtctgcgcgcccgccgtgcgccctcagctccttttcctgagcccgccgcgatgggagctgcgcggggatccccggccagaccccgccggttgcctctgctcagcgtcctgctgctgccgctgctgggcggtacccagacagccattgtcttcatcaagcagccgtcctcccaggatgcactgcaggggcgccgggcgctgcttcgctgtgaggttgaggctccgggcccggtacatgtgtactggctgctcgatggggcccctgtccaggacacggagcggcgtttcgcccagggcagcagcctgagctttgcagctgtggaccggctgcaggactctggcaccttccagtgtgtggctcgggatgatgtcactggagaagaagcccgcagtgccaacgcctccttcaacatcaaatggattgaggcaggtcctgtggtcctgaagcatccagcctcggaagctgagatccagccacagacccaggtcacacttcgttgccacattgatgggcaccctcggcccacctaccaatggttccgagatgggacccccctttctgatggtcagagcaaccacacagtcagcagcaaggagcggaacctgacgctccggccagctggtcctgagcatagtgggctgtattcctgctgcgcccacagtgcttttggccaggcttgcagcagccagaacttcaccttgagcattgctggtgagcctggggtgggggcggaagggatgaggtgagcacaggagggcctcaccacccaggctgcatgctcccccatctttccctctccagatgaaagctttgccagggtggtgctggcaccccaggacgtggtagtagcgaggtatgaggaggccatgttccattgccagttctcagcccagccacccccgagcctgcagtggctctttgaggatgagactcccatcactaaccgcagtcgccccccacacctccgcagagccacagtgtttgccaacgggtctctgctgctgacccaggtccggccacgcaatgcagggatctaccgctgcattggccaggggcagaggggcccacccatcatcctggaagccacacttcacctagcagagattgaagacatgccgctatttgagccacgggtgtttacagctggcagcgaggagcgtgtgacctgccttccccccaagggtctgccagagcccagcgtgtggtgggagcacgcgggagtccggctgcccacccatggcagggtctaccagaagggccacgagctggtgttggccaatattgctgaaagtgatgctggtgtctacacctgccacgcggccaacctggctggtcagcggagacaggatgtcaacatcactgtggccactgtgccctcctggctgaagaagccccaagacagccagctggaggagggcaaacccggctacttggattgcctgacccaggccacaccaaaacctacagttgtctggtacagaaaccagatgctcatctcagaggactcacggttcgaggtcttcaagaatgggaccttgcgcatcaacagcgtggaggtgtatgatgggacatggtaccgttgtatgagcagcaccccagccggcagcatcgaggcgcaagcccgtgtccaagtgctggatgggagcagcctcccagagtgggtgacagacaacgctgggaccctgcattttgcccgggtgactcgagatgacgctggcaactacacttgcattgcctccaacgggccgcagggccagattcgtgcccatgtccagctcactgtggcagtttttatcaccttcaaagtggaaccagagcgtacgactgtgtaccagggccacacagccctactgcagtgcgaggcccagggggaccccaagccgctgattcagtggaaaggcaaggaccgcatcctggaccccaccaagctgggacccaggatgcacatcttccagaatggctccctggtgatccatgacgtggcccctgaggactcaggccgctacacctgcattgcaggcaacagctgcaacatcaagcacacggaggcccccctctatgtcgtggacaagcctgtgccggaggagtcggagggccctggcagccctcccccctacaagatgatccagaccattgggttgtcggtgggtgccgctgtggcctacatcattgccgtgctgggcctcatgttctactgcaagaagcgctgcaaagccaagcggctgcagaagcagcccgagggcgaggagccagagatggaatgcctcaacggtgggcctttgcagaacgggcagccctcagcagagatccaagaagaagtggccttgaccagcttgggctccggccccgcggccaccaacaaacgccacagcacaagtgataagatgcacttcccacggtctagcctgcagcccatcaccacgctggggaagagtgagtttggggaggtgttcctggcaaaggctcagggcttggaggagggagtggcagagaccctggtacttgtgaagagcctgcagagcaaggatgagcagcagcagctggacttccggagggagttggagatgtttgggaagctgaaccacgccaacgtggtgcggctcctggggctgtgccgggaggctgagccccactacatggtgctggaatatgtggatctgggagacctcaagcagttcctgaggatttccaagagcaaggatgaaaaattgaagtcacagcccctcagcaccaagcagaaggtggccctatgcacccaggtagccctgggcatggagcacctgtccaacaaccgctttgtgcataaggacttggctgcgcgtaactgcctggtcagtgcccagagacaagtgaaggtgtctgccctgggcctcagcaaggatgtgtacaacagtgagtactaccacttccgccaggcctgggtgccgctgcgctggatgtcccccgaggccatcctggagggtgacttctctaccaagtctgatgtctgggccttcggtgtgctgatgtgggaagtgtttacacatggagagatgccccatggtgggcaggcagatgatgaagtactggcagatttgcaggctgggaaggctagacttcctcagcccgagggctgcccttccaaactctatcggctgatgcagcgctgctgggccctcagccccaaggaccggccctccttcagtgagattgccagcgccctgggagacagcaccgtggacagcaagccgtgaggagggagcccgctcaggatggcctgggcaggggaggacatctctagagggaagctcacagcatgatgggcaagatccctgtcctcctgggccctgaggcccctgccctagtgcaacaggcattgctgaggtctgagcagggcctggcctttcctcctcttcctcaccctcatcctttgggaggctgacttggacccaaactgggcgactagggctttgagctgggcagttttccctgccacctcttcctctatcagggacagtgtgggtgccacaggtaaccccaatttctggccttcaacttctccccttgaccgggtccaactctgccactcatctgccaactttgcctggggagggctaggcttgggatgagctgggtttgtggggagttccttaatattctcaagttctgggcacacagggttaatgagtctcttggcccactggtcccacttgggggtctagaccaggattatagaggacacagcaagtgagtcctccccactctgggcttgtgcacactgacccagacccacgtcttccccacccttctctcctttcctcatcctaagtgcctggcagatgaaggagttttcaggagcttttgacactatataaaccgccctttttgtatgcaccacgggcggcttttatatgtaattgcagcgtggggtgggtgggcatgggaggtaggggtgggccctggagatgaggagggtgggccatccttaccccacacttttattgttgtcgttttttgtttgttttgtttttttgtttttgtttttgtttttacactcgctgctctcaataaataagccttttttacaacctg

SEQ ID NO: 1093 - DNA, 287 bp, Artificial
  Synthetic oligonucleotide
ggcggcggcggcggcgcgcggggactcggaggtactgggcgcgcgcggctccggctcgggacgcctcgggacgcctcggggtcgggctccggctgcggctgctgctgcggcgcccgcgctccggtgcgctccgcctcctgtgcccgccgcggagcgcagtctgcgcgcccgccgtgcgccctcagctccttttcctgagcccgccgcgatgggagctgcgcggggatccccggccagaccccgccggttgcctctgctcagcgtcctgctgctgccgctgctgggcg

SEQ ID NO: 1094 - DNA, 164 bp, Artificial
  Synthetic oligonucleotide
gtacccagacagccattgtcttcatcaagcagccgtcctcccaggatgcactgcaggggcgccgggcgctgcttcgctgtgaggttgaggctccgggcccggtacatgtgtactggctgctcgatggggcccctgtccaggacacggagcggcgtttcgcccag

SEQ ID NO: 1095 - DNA, 124 bp, Artificial
  Synthetic oligonucleotide
ggcagcagcctgagctttgcagctgtggaccggctgcaggactctggcaccttccagtgtgtggctcgggatgatgtcactggagaagaagcccgcagtgccaacgcctccttcaacatcaaat

SEQ ID NO: 1096 - DNA, 397 bp, Artificial
  Synthetic oligonucleotide
gtgagagccaggggggctgtgcccagtccccctgtcagaccctcaatgactgaggcctgggggatccctcccttacctcagcttctcccatttccagttaaacgggccaggcagaatgcatttatcatcagctttttttgctcatgtggataagaggaaattaaaagttatattttttccaaaattttttccttcaagtctgggacccatttatctgctgcatgcttgtgcaaatggaaagggcggccgagcccttggccaagtgtcagacttgacctgccagggaccaggcaggcacttagtatctggtaactgtagccccagcctcagcctccagggcttccttgtgtctgttggcacagagcctcgaggttccacggcttcctgcttgtcctcc

SEQ ID NO: 1097 - DNA, 191 bp, Artificial
  Synthetic oligonucleotide
gcccacctaccaatggttccgagatgggacccccctttctgatggtcagagcaaccacacagtcagcagcaaggagcggaacctgacgctccggccagctggtcctgagcatagtgggctgtattcctgctgcgcccacagtgcttttggccaggcttgcagcagccagaacttcaccttgagcattgctg

SEQ ID NO: 1098 - DNA, 151 bp, Artificial
  Synthetic oligonucleotide
atgaaagctttgccagggtggtgctggcaccccaggacgtggtagtagcgaggtatgaggaggccatgttccattgccagttctcagcccagccacccccgagcctgcagtggctctttgaggatgagactcccatcactaaccgcagtcg

SEQ ID NO: 1099 - DNA, 149 bp, Artificial
  Synthetic oligonucleotide
ccccccacacctccgcagagccacagtgtttgccaacgggtctctgctgctgacccaggtccggccacgcaatgcagggatctaccgctgcattggccaggggcagaggggcccacccatcatcctggaagccacacttcacctagcag

SEQ ID NO: 1100 - DNA, 199 bp, Artificial
  Synthetic oligonucleotide
cttccccccaagggtctgccagagcccagcgtgtggtgggagcacgcgggagtccggctgcccacccatggcagggtctaccagaagggccacgagctggtgttggccaatattgctgaaagtgatgctggtgtctacacctgccacgcggccaacctggctggtcagcggagacaggatgtcaacatcactgtggcca

SEQ ID NO: 1101 - DNA, 1363 bp, Artificial
  Synthetic oligonucleotide
gtgagcacctttgccctgaaggtcaaggagaggtggaggggaacacaggtctgggtgtgatggacagaggcttccctggtactcacctgaggtcctctcagttctgggccctgcaggcttgggaatcagttcactactgggagtcggtgtagacagtagagagccaggcacaggggttagggtgggtgctccagaggaaatagtgacagccctcacagaaaaatggtcctctgggtacagaggaaagagcaatagactaggaatctagagacctgggtcccactatgctcccaatgcacagagtgacgatggtagcaaatcacccaccttactggggttcagtctcctcatccataaaatggagccagtaatctactacctaccccacaaggtggttggaaaggtcaaatgaagtagatgaaaatgatttttctttttttcttttttgggaggtaatagtggacaaaattataggtgatttttaatttgttttagtttgttatgctttccaaatttctttactaaacatattacttatgaaaaaaaagagggggagaaaagcaagacatatgactgaaagtacacatgataaaccctttatatcaggctgggcgcggtggctcatgcctgtaatcccagcactttgggaggccgagccgggcggatcacaaggtcaggagttggagaccagcctgaccaacatggtgaaaccccatctctactaaaaatacaaaaattagctgggcgtggtggggcacacctgtaatcccagctactcaggaggctgagggaggaaaattgcttgaacccaggaggcagaggttgcaatgagctgagatcgcaccgttgctcttcagcccgggcaacagagtgagactccatctcaaaacaaaacaaaacaaaccttatatcctcactacaggcatagggatttatttgtttacttatttctttataccatgccttgttccaaaccttttgtggtagtttaaaaggatacacaataaaaattacaatatgcacacagagacacacatacatacaaactattttgcaatctgcttcttccacttacctttatgttactattatctttccgagtgggtaactttgcaaaaagatttgaatatgaaagtggctttgtaaatgtgaagttgtgatgctagtattcccattaggatactgaaatcttagaagacatgcacctatactcaggccgtgatttgggtgggaatcacagcacatgtgtaacgagtgctcaggacactcacagtgcaggtgcaaaggcaagatgcacagtcaagccttcctccagttgaggtctgagaatcacctgctttcattagggatactttttcttctt

SEQ ID NO: 1102 - DNA, 134 bp, Artificial
  Synthetic oligonucleotide
ctgtgccctcctggctgaagaagccccaagacagccagctggaggagggcaaacccggctacttggattgcctgacccaggccacaccaaaacctacagttgtctggtacagaaaccagatgctcatctcagag

SEQ ID NO: 1103 - DNA, 121 bp, Artificial
  Synthetic oligonucleotide
gtcttcaagaatgggaccttgcgcatcaacagcgtggaggtgtatgatgggacatggtaccgttgtatgagcagcaccccagccggcagcatcgaggcgcaagcccgtgtccaagtgctgg

SEQ ID NO: 1104 - DNA, 120 bp, Artificial
  Synthetic oligonucleotide
aaaagctcaagttcacaccaccaccccagccacagcagtgcatggagtttgacaaggaggccacggtgccctgttcagccacaggccgagagaagcccactattaagtgggaacgggcag

SEQ ID NO: 1105 - DNA, 150 bp, Artificial
  Synthetic oligonucleotide
atgggagcagcctcccagagtgggtgacagacaacgctgggaccctgcattttgcccgggtgactcgagatgacgctggcaactacacttgcattgcctccaacgggccgcagggccagattcgtgcccatgtccagctcactgtggcag

SEQ ID NO: 1106 - DNA, 478 bp, Artificial
  Synthetic oligonucleotide
gtatgggctggggagggttatgctgcacaggaagtggtgggcccagacgtttgtcaccttgtactcagcccctgtgtacagaacatggcacagaagccatttttgtggcagcggtggggattcggccgtctcaccatgctgctgcacagtcttagagtccttgctcagagccgggctgtcgtttatttaacatccaacggtcggtgtgtgtgtgtgtgtgttgtgggggagtgggggggtgttctcttcctacaatgctgcctcccaggttcctgcagcagccacacatatctctgggtggctggggaggaggaccaggtcagaatgcagtaggacaaggttcttttctccaggaggcccagagaggatgatgggtcaggtaaaaggccctgcacttaactctctgcccctgggagacttatttctcctctggggacttgtttctgcatccacaggtgaaagtggtttaaatgagaag

SEQ ID NO: 1107 - DNA, 639 bp, Artificial
  Synthetic oligonucleotide
ctcttaaactttcttggtttggcagcagagttatttttctagacaaagtataatgtgaaagtttaaatggatgaaaatgaactgaggaggcccccttggtgggagccactggggtgtgtgtggcagttgggggatcctgcatggtctcccttcattcccctaatgcctcttgaggcccctcagtgtgggccattaaaaggcccctagaccagcagatcccttctacagatctgcttattgaaaaacctgctctgtgccaggcagtgcctggaattctaaacctgaagctcccaaatgctgctctccggggcctggctcacattatcaagtcacttgggaagcttaacaaataacgtgggtttgtggtagctccttgacaggtgtgcttatccgtgtcgcctgtcttggcttccgatgcaaagccagcttgggaacccctggcctcatctccttcagagtcttcgtttgaccttggtggggcatgaggacctgctggcccttgttaaagccagtgaaggtggtgaccctcccgggccatctgttaagttgccctgttgatggggttgggaggagttagtagagaagcagggcttcttttgcttagcagcccctgcccagacccatctgtgtgtctctcag

SEQ ID NO: 1108 - DNA, 830 bp, Artificial
  Synthetic oligonucleotide
gtgaggggccctggacggggaggtggtgcccgtgtgcgggagctgagcgccctcccgcggccacggaggggagagcgccagcactctggaaaccgagcggctgttgctgggtcctggagctgggactgccccacccctagcgggaagcctggagttggattcccagggcctcgtcttctgagcaacctggcttgagacttcttcattggagccccttggaccagcttcctatgattccctgctgtttcctcctcccagcacaaaaccacagatatcattagtatatgtacacacgttgctgttgcatgtcttgtctccctctatgagtctaagagctcccccaggggcagtctttctgtttacttcccttctcctatccccacttcctggactgggagctccttgaggtcattgctgggtctctcctatcagctcaggtgttcaggagcagaggttgggtctccattattgtgattttccctttgtgcctgtttagggctttgcccaataggaggccccatgaaagcaaaaatccttatgtgtagctatggtattaaggaccagtgattcagattagatgtctgcagttggcttcatctcagaggtcataatcagctgcatcactaaggggtcataccctaggggatagccatacatcccccacccagccccagccccattatttcatcatttgggcttgccctttcatgtggagcactgtgattggacccaagttggcaagagtggaagaccaggggacagaacagaaatccccatggtggccagagtgtcaggtctcatcgtgacgctcttgtcctcctccttcccag

SEQ ID NO: 1109 - DNA, 249 bp, Artificial
  Synthetic oligonucleotide
gtatgttgccttgactacagctgcccctgcctaactacaagtcacccgctgtgtcttgaggctgggtacgggctagtgttctgaagtccctgaaacctagaatgttagaggtggagggaagcataggtagagatctagcccagtgtggccccagagcctgttattcactgcccttcgtgcagattttgtcattcctgtgtactacctgtagtattatttacttgatgttttatttaaattgactcttta

SEQ ID NO: 1110 - DNA, 213 bp, Artificial
  Synthetic oligonucleotide
gtgttcctggcaaaggctcagggcttggaggagggagtggcagagaccctggtacttgtgaagagcctgcagagcaaggatgagcagcagcagctggacttccggagggagttggagatgtttgggaagctgaaccacgccaacgtggtgcggctcctggggctgtgccgggaggctgagccccactacatggtgctggaatatgtggatctg

SEQ ID NO: 1111 - DNA, 152 bp, Artificial
  Synthetic oligonucleotide
gtggccctatgcacccaggtagccctgggcatggagcacctgtccaacaaccgctttgtgcataaggacttggctgcgcgtaactgcctggtcagtgcccagagacaagtgaaggtgtctgccctgggcctcagcaaggatgtgtacaacag

SEQ ID NO: 1112 - DNA, 122 bp, Artificial
  Synthetic oligonucleotide
tgagtactaccacttccgccaggcctgggtgccgctgcgctggatgtcccccgaggccatcctggagggtgacttctctaccaagtctgatgtctgggccttcggtgtgctgatgtgggaag

SEQ ID NO: 1113 - DNA, 700 bp, Artificial
  Synthetic oligonucleotide
atttgcaggctgggaaggctagacttcctcagcccgagggctgcccttccaaactctatcggctgatgcagcgctgctgggccctcagccccaaggaccggccctccttcagtgagattgccagcgccctgggagacagcaccgtggacagcaagccgtgaggagggagcccgctcaggatggcctgggcaggggaggacatctctagagggaagctcacagcatgatgggcaagatccctgtcctcctgggccctgaggcccctgccctagtgcaacaggcattgctgaggtctgagcagggcctggcctttcctcctcttcctcaccctcatcctttgggaggctgacttggacccaaactgggcgactagggctttgagctgggcagttttccctgccacctcttcctctatcagggacagtgtgggtgccacaggtaaccccaatttctggccttcaacttctccccttgaccgggtccaactctgccactcatctgccaactttgcctggggagggctaggcttgggatgagctgggtttgtggggagttccttaatattctcaagttctgggcacacagggttaatgagtctcttggcccactggtcccacttgggggtctagaccaggattatagaggacacagcaagtgagtcctccccactctgggcttgtgcacactgacccagacccac

SEQ ID NO: 1114 - DNA, 253 bp, Artificial
  Synthetic oligonucleotide
atgaaggagttttcaggagcttttgacactatataaaccgccctttttgtatgcaccacgggcggcttttatatgtaattgcagcgtggggtgggtgggcatgggaggtaggggtgggccctggagatgaggagggtgggccatccttaccccacacttttattgttgtcgttttttgtttgttttgtttttttgtttttgtttttgtttttacactcgctgctctcaataaataagccttttttacaacctg

SEQ ID NO: 1115 - DNA, 103 bp, Artificial
  Synthetic oligonucleotide
ggattgaggcaggtcctgtggtcctgaagcatccagcctcggaagctgagatccagccacagacccaggtcacacttcgttgccacattgatgggcaccctcg

SEQ ID NO: 1116 - DNA, 90 bp, Artificial
  Synthetic oligonucleotide
gtgagcctggggtgggggcggaagggatgaggtgagcacaggagggcctcaccacccaggctgcatgctcccccatctttccctctccag

SEQ ID NO: 1117 - DNA, 68 bp, Artificial
  Synthetic oligonucleotide
agattgaagacatgccgctatttgagccacgggtgtttacagctggcagcgaggagcgtgtgacctgc

SEQ ID NO: 1118 - DNA, 15 bp, Artificial
  Synthetic oligonucleotide
gactcacggttcgag

SEQ ID NO: 1119 - DNA, 111 bp, Artificial
  Synthetic oligonucleotide
tttttatcaccttcaaagtggaaccagagcgtacgactgtgtaccagggccacacagccctactgcagtgcgaggcccagggggaccccaagccgctgattcagtggaaag

SEQ ID NO: 1120 - DNA, 40 bp, Artificial
  Synthetic oligonucleotide
gcaaggaccgcatcctggaccccaccaagctgggacccag

SEQ ID NO: 1121 - DNA, 16 bp, Artificial
  Synthetic oligonucleotide
gatgcacatcttccag

SEQ ID NO: 1122 - DNA, 112 bp, Artificial
  Synthetic oligonucleotide
aatggctccctggtgatccatgacgtggcccctgaggactcaggccgctacacctgcattgcaggcaacagctgcaacatcaagcacacggaggcccccctctatgtcgtgg

SEQ ID NO: 1123 - DNA, 5 bp, Artificial
  Synthetic oligonucleotide
acaag

SEQ ID NO: 1124 - DNA, 119 bp, Artificial
  Synthetic oligonucleotide
cctgtgccggaggagtcggagggccctggcagccctcccccctacaagatgatccagaccattgggttgtcggtgggtgccgctgtggcctacatcattgccgtgctgggcctcatgtt

SEQ ID NO: 1125 - DNA, 64 bp, Artificial
  Synthetic oligonucleotide
ctactgcaagaagcgctgcaaagccaagcggctgcagaagcagcccgagggcgaggagccagag

SEQ ID NO: 1126 - DNA, 16 bp, Artificial
  Synthetic oligonucleotide
atggaatgcctcaacg

SEQ ID NO: 1127 - DNA, 75 bp, Artificial
  Synthetic oligonucleotide
gtgggcctttgcagaacgggcagccctcagcagagatccaagaagaagtggccttgaccagcttgggctccggcc

SEQ ID NO: 1128 - DNA, 30 bp, Artificial
  Synthetic oligonucleotide
ccgcggccaccaacaaacgccacagcacaa

SEQ ID NO: 1129 - DNA, 36 bp, Artificial
  Synthetic oligonucleotide
gtgataagatgcacttcccacggtctagcctgcagc

SEQ ID NO: 1130 - DNA, 15 bp, Artificial
  Synthetic oligonucleotide
ccatcaccacgctgg

SEQ ID NO: 1131 - DNA, 20 bp, Artificial
  Synthetic oligonucleotide
ggaagagtgagtttggggag

SEQ ID NO: 1132 - DNA, 81 bp, Artificial
  Synthetic oligonucleotide
ggagacctcaagcagttcctgaggatttccaagagcaaggatgaaaaattgaagtcacagcccctcagcaccaagcagaag

SEQ ID NO: 1133 - DNA, 42 bp, Artificial
  Synthetic oligonucleotide
tgtttacacatggagagatgccccatggtgggcaggcagatg

SEQ ID NO: 1134 - DNA, 15 bp, Artificial
  Synthetic oligonucleotide
atgaagtactggcag

SEQ ID NO: 1135 - DNA, 7 bp, Artificial
  Synthetic oligonucleotide
gtcttcc

SEQ ID NO: 1136 - DNA, 23 bp, Artificial
  Synthetic oligonucleotide
ccacccttctctcctttcctcat

SEQ ID NO: 1137 - DNA, 16 bp, Artificial
  Synthetic oligonucleotide
cctaagtgcctggcag

SEQ ID NO: 1138 - DNA, 55 bp, Artificial
  Synthetic oligonucleotide
gcggcccgcttggctggtggggcccgcggcgggattttcccgggcggcgagagcg

SEQ ID NO: 1139 - DNA, 89 bp, Artificial
  Synthetic oligonucleotide
gatctatcttgggatcccatggctttctttactgggctctggggccccttcacctgtgtaagcagagtgctgagccatcactgtttcag

SEQ ID NO: 1140 - DNA, 69 bp, Artificial
  Synthetic oligonucleotide
caccactgggagtctgagtgcgattcagaagatgacgcgggtacgagtggtggacaacagtgccctggg

SEQ ID NO: 1141 - protein, 1070 aa, Homo sapiens [sequence omitted]

SEQ ID NO: 1142 - protein, 1070 aa, Homo sapiens
MGAARGSPARPRRLPLLSVLLLPLLGGTQTAIVFIKQPSSQDALQGRRALLRCEVEAPGPVHVYWLLDGAPVQDTERRFAQGSSLSFAAVDRLQDSGTFQCVARDDVTGEEARSANASFNIKWIEAGPVVLKHPASEAEIQPQTQVTLRCHIDGHPRPTYQWFRDGTPLSDGQSNHTVSSKERNLTLRPAGPEHSGLYSCCAHSAFSQACSSQNFTLSIADESFARVVLAPQDVVVARYEEAMFHCQFSAQPPPSLQWLFEDETPITNRSRPPHLRRATVFANGSLLLTQVRPRNAGIYRCIGQGQRGPPIILEATLHLAEIEDMPLFEPRVFTAGSEERVTCLPPKGLPEPSVWWEHAGVRLPTHGRVYQKGHELVLANIAESDAGVYTCHAANLAGQRRQDVNITVATVPSWLKKPQDSQLEEGKPGYLDCLTQATPKPTVVWYRNQMLISEDSRFEVFKNGTLRINSVEVYDGTWYRCMSSTPAGSIEAQAVLQVLEKLKFTPPPQPQQCMGFDKEATVPCSATGREKPTIKWERADGSSLPEWVTDNAGTLHFARVTRDDAGNYTCIASNGPQGQIRAHVQLTVAVFITFKVEPERTTVYQGHTALLQCEAQGDPKPLIQWKGKDRILDPTKLGPRMHIFQNGSLVIHDVAPEDSGRYTCIAGNSCNIKHTEAPLYVVDKPVPEESEGPGSPPPYKMIQTIGLSVGAAVAYIIAVLGLMFYCKKRCKAKRLQKQPEGEEPEMECLNGGPLQNGQPSAEIQEEVALTSLGSGPAATNKRHSTSDKMHFPRSSLQPITTLGKSEFGEVFLAKAQGLEEGVAETLVLVKSLQSKDEQQQLDFRRELEMFGKLNHANVVRLLGLCREAEPHYMVLEYVDLEDLKQFLRISKSKDEKLKSQPLSTKQKVALCTQVALGMEHLSNNRFVHKDLAARNCLVSAQRQVKVSALGLSKDVYNSEYYHFRQAWVALRWMSPEAILEGDFSTKSDVWASGVLMWEVFTHGEMPHGGQADDEVLADLQAGKARLPQPEGCPSKLYRLMQRCWALSPKDRPSFSEIASALGDSTVDSKP

SEQ ID NO: 1143 - protein, 1070 aa, Homo sapiens
MGAARGSPARPRRLPLLSVLLLPLLGGTQTAIVFIKQPSSQDALQGRRALLRCEVEAPGPVHVYWLLDGAPVQDTERRFAQGSSLSFAAVDRLQDSGTFQCVARDDVTGEEARSANASFNIKWIEAGPVVLKHPASEAEIQPQTQVTLRCHIDGHPRPTYQWFRDGTPLSDGQSNHTVSSKERNLTLRPAGPEHSGLYSCCAHSAFGQACSSQNFTLSIADESFARVVLAPQDVVVARYEEAMFHCQFSAQPPPSLQWLFEDETPITNRSRPPHLRRATVFANGSLLLTQVRPRNAGIYRCIGQGQRGPPIILEATLHLAEIEDMPLFEPRVFTAGSEERVTCLPPKGLPEPSVWWEHAGVRLPTHGRVYQKGHELVLANIAESDAGVYTCHAANLAGQRRQDVNITVATVPSWLKKPQDSQLEEGKPGYLDCLTQATPKPTVVWYRNQMLISEDSRFEVFKNGTLRINSVEVYDGTWYRCMSSTPAGSIEAQARVQVLEKLKFTPPPQPQQCMEFDKEATVPCSATGREKPTIKWERADGSSLPEWVTDNAGTLHFARVTRDDAGNYTCIASNGPQGQIRAHVQLTVAVFITFKVEPERTTVYQGHTALLQCEAQGDPKPLIQWKGKDRILDPTKLGPRMHIFQNGSLVIHDVAPEDSGRYTCIAGNSCNIKHTEAPLYVVDKPVPEESEGPGSPPPYKMIQTIGLSVGAAVAYIIAVLGLMFYCKKRCKAKRLQKQPEGEEPEMECLNGGPLQNGQPSAEIQEEVALTSLGSGPAATNKRHSTSDKMHFPRSSLQPITTLGKSEFGEVFLAKAQGLEEGVAETLVLVKSLQSKDEQQQLDFRRELEMFGKLNHANVVRLLGLCREAEPHYMVLEYVDLEDLKQFLRISKSKDEKLKSQPLSTKQKVALCTQVALGMEHLSNNRFVHKDLAARNCLVSAQRQVKVSALGLSKDVYNSEYYHFRQAWVALRWMSPEAILEGDFSTKSDVWASGVLMWEVFTHGEMPHGGQADDEVLADLQAGKARLPQPEGCPSKLYRLMQRCWALSPKDRPSFSEIASALGDSTVDSKP

SEQ ID NO: 1144 - protein, 1070 aa, Homo sapiens
MGAARGSPARPRRLPLLSVLLLPLLGGTQTAIVFIKQPSSQDALQGRRALLRCEVEAPGPVHVYWLLDGAPVQDTERRFAQGSSLSFAAVDRLQDSGTFQCVARDDVTGEEARSANASFNIKWIEAGPVVLKHPASEAEIQPQTQVTLRCHIDGHPRPTYQWFRDGTPLSDGQSNHTVSSKERNLTLRPAGPEHSGLYSCCAHSAFGQACSSQNFTLSIADESFARVVLAPQDVVVARYEEAMFHCQFSAQPPPSLQWLFEDETPITNRSRPPHLRRATVFANGSLLLTQVRPRNAGIYRCIGQGQRGPPIILEATLHLAEIEDMPLFEPRVFTAGSEERVTCLPPKGLPEPSVWWEHAGVRLPTHGRVYQKGHELVLANIAESDAGVYTCHAANLAGQRRQDVNITVATVPSWLKKPQDSQLEEGKPGYLDCLTQATPKPTVVWYRNQMLISEDSRFEVFKNGTLRINSVEVYDGTWYRCMSSTPAGSIEAQAVLQVLEKLKFTPPPQPQQCMGFDKEATVPCSATGREKPTIKWERADGSSLPEWVTDNAGTLHFARVTRDDAGNYTCIASNGPQGQIRAHVQLTVAVFITFKVEPERTTVYQGHTALLQCEAQGDPKPLIQWKGKDRILDPTKLGPRMHIFQNGSLVIHDVAPEDSGRYTCIAGNSCNIKHTEAPLYVVDKPVPEESEGPGSPPPYKMIQTIGLSVGAAVAYIIAVLGLMFYCKKRCKAKRLQKQPEGEEPEMECLNGGPLQNGQPSAEIQEEVALTSLGSGPAATNKRHSTSDKMHFPRSSLQPITTLGKSEFGEVFLAKAQGLEEGVAETLVLVKSLQSKDEQQQLDFRRELEMFGKLNHANVVRLLGLCREAEPHYMVLEYVDLEDLKQFLRISKSKDEKLKSQPLSTKQKVALCTQVALGMEHLSNNRFVHKDLAARNCLVSAQRQVKVSALGLSKDVYNSEYYHFRQAWVALRWMSPEAILEGDFSTKSDVWASGVLMWEVFTHGEMPHGGQADDEVLADLQAGKARLPQPEGCPSKLYRLMQRCWALSPKDRPSFSEIASALGDSTVDSKP

SEQ ID NO: 1145 - protein, 1070 aa, Homo sapiens
MGAARGSPARPRRLPLLSVLLLPLLGGTQTAIVFIKQPSSQDALQGRRALLRCEVEAPGPVHVYWLLDGAPVQDTERRFAQGSSLSFAAVDRLQDSGTFQCVARDDVTGEEARSANASFNIKWIEAGPVVLKHPASEAEIQPQTQVKLRCHIDGHPRPTYQWFRDGTPLSDGQSNHTVSSKERNLTLRPAGPEHSGLYSCCAHSAFSQACSSQNFTLSIADESFARVVLAPQDVVVARYEEAMFHCQFSAQPPPSLQWLFEDETPITNRSRPPHLRRATVFANGSLLLTQVRPRNAGIYRCIGQGQRGPPIILEATLHLAEIEDMPLFEPRVFTAGSEERVTCLPPKGLPEPSVWWEHAGVRLPTHGRVYQKGHELVLANIAESDAGVYTCHAANLAGQRRQDVNITVATVPSWLKKPQDSQLEEGKPGYLDCLTQATPKPTVVWYRNQMLISEDSRFEVFKNGTLRINSVEVYDGTWYRCMSSTPAGSIEAQAVLQVLEKLKFTPPPQPQQCMGFDKEATVPCSATGREKPTIKWERADGSSLPEWVTDNAGTLHFARVTRDDAGNYTCIASNGPQGQIRAHVQLTVAVFITFKVEPERTTVYQGHTALLQCEAQGDPKPLIQWKGKDRILDPTKLGPRMHIFQNGSLVIHDVAPEDSGRYTCIAGNSCNIKHTEAPLYVVDKPVPEESEGPGSPPPYKMIQTIGLSVGAAVAYIIAVLGLMFYCKKRCKAKRLQKQPEGEEPEMECLNGGPLQNGQPSAEIQEEVALTSLGSGPAATNKRHSTSDKMHFPRSSLQPITTLGKSEFGEVFLAKAQGLEEGVAETLVLVKSLQSKDEQQQLDFRRELEMFGKLNHANVVRLLGLCREAEPHYMVLEYVDLEDLKQFLRISKSKDEKLKSQPLSTKQKVALCTQVALGMEHLSNNRFVHKDLAARNCLVSAQRQVKVSALGLSKDVYNSEYYHFRQAWVALRWMSPEAILEGDFSTKSDVWASGVLMWEVFTHGEMPHGGQADDEVLADLQAGKARLPQPEGCPSKLYRLMQRCWALSPKDRPSFSEIASALGDSTVDSKP

SEQ ID NO: 1146 - protein, 1030 aa, Homo sapiens
MGAARGSPARPRRLPLLSVLLLPLLGGTQTAIVFIKQPSSQDALQGRRALLRCEVEAPGPVHVYWLLDGAPVQDTERRFAQGSSLSFAAVDRLQDSGTFQCVARDDVTGEEARSANASFNIKWIEAGPVVLKHPASEAEIQPQTQVTLRCHIDGHPRPTYQWFRDGTPLSDGQSNHTVSSKERNLTLRPAGPEHSGLYSCCAHSAFGQACSSQNFTLSIADESFARVVLAPQDVVVARYEEAMFHCQFSAQPPPSLQWLFEDETPITNRSRPPHLRRATVFANGSLLLTQVRPRNAGIYRCIGQGQRGPPIILEATLHLAEIEDMPLFEPRVFTAGSEERVTCLPPKGLPEPSVWWEHAGVRLPTHGRVYQKGHELVLANIAESDAGVYTCHAANLAGQRRQDVNITVATVPSWLKKPQDSQLEEGKPGYLDCLTQATPKPTVVWYRNQMLISEDSRFEVFKNGTLRINSVEVYDGTWYRCMSSTPAGSIEAQARVQVLDGSSLPEWVTDNAGTLHFARVTRDDAGNYTCIASNGPQGQIRAHVQLTVAVFITFKVEPERTTVYQGHTALLQCEAQGDPKPLIQWKGKDRILDPTKLGPRMHIFQNGSLVIHDVAPEDSGRYTCIAGNSCNIKHTEAPLYVVDKPVPEESEGPGSPPPYKMIQTIGLSVGAAVAYIIAVLGLMFYCKKRCKAKRLQKQPEGEEPEMECLNGGPLQNGQPSAEIQEEVALTSLGSGPAATNKRHSTSDKMHFPRSSLQPITTLGKSEFGEVFLAKAQGLEEGVAETLVLVKSLQSKDEQQQLDFRRELEMFGKLNHANVVRLLGLCREAEPHYMVLEYVDLGDLKQFLRISKSKDEKLKSQPLSTKQKVALCTQVALGMEHLSNNRFVHKDLAARNCLVSAQRQVKVSALGLSKDVYNSEYYHFRQAWVPLRWMSPEAILEGDFSTKSDVWAFGVLMWEVFTHGEMPHGGQADDEVLADLQAGKARLPQPEGCPSKLYRLMQRCWALSPKDRPSFSEIASALGDSTVDSKP

SEQ ID NO: 1147 - protein, 816 aa, Homo sapiens
MGAARGSPARPRRLPLLSVLLLPLLGGTQTAIVFIKQPSSQDALQGRRALLRCEVEAPGPVHVYWLLDGAPVQDTERRFAQGSSLSFAAVDRLQDSGTFQCVARDDVTGEEARSANASFNIKWIEAGPVVLKHPASEAEIQPQTQVTLRCHIDGHPRPTYQWFRDGTPLSDGQSNHTVSSKERNLTLRPAGPEHSGLYSCCAHSAFGQACSSQNFTLSIADESFARVVLAPQDVVVARYEEAMFHCQFSAQPPPSLQWLFEDETPITNRSRPPHLRRATVFANGSLLLTQVRPRNAGIYRCIGQGQRGPPIILEATLHLAEIEDMPLFEPRVFTAGSEERVTCLPPKGLPEPSVWWEHAGVRLPTHGRVYQKGHELVLANIAESDAGVYTCHAANLAGQRRQDVNITVATVPSWLKKPQDSQLEEGKPGYLDCLTQATPKPTVVWYRNQMLISEDSRFEVFKNGTLRINSVEVYDGTWYRCMSSTPAGSIEAQARVQVLEKLKFTPPPQPQQCMEFDKEATVPCSATGREKPTIKWERADGSSLPEWVTDNAGTLHFARVTRDDAGNYTCIASNGPQGQIRAHVQLTVAVFITFKVEPERTTVYQGHTALLQCEAQGDPKPLIQWKGKDRILDPTKLGPRMHIFQNGSLVIHDVAPEDSGRYTCIAGNSCNIKHTEAPLYVVDKPVPEESEGPGSPPPYKMIQTIGLSVGAAVAYIIAVLGLMFYCKKRCKAKRLQKQPEGEEPEMECLNGGPLQNGQPSAEIQEEVALTSLGSGPAATNKRHSTSDKMHFPRSSLQPITTLGRPQAVPEDFQEQG

SEQ ID NO: 1148 - protein, 940 aa, Homo sapiens
MGAARGSPARPRRLPLLSVLLLPLLGGTQTAIVFIKQPSSQDALQGRRALLRCEVEAPGPVHVYWLLDGAPVQDTERRFAQGSSLSFAAVDRLQDSGTFQCVARDDVTGEEARSANASFNIKWIEAGPVVLKHPASEAEIQPQTQVTLRCHIDGHPRPTYQWFRDGTPLSDGQSNHTVSSKERNLTLRPAGPEHSGLYSCCAHSAFGQACSSQNFTLSIADESFARVVLAPQDVVVARYEEAMFHCQFSAQPPPSLQWLFEDETPITNRSRPPHLRRATVFANGSLLLTQVRPRNAGIYRCIGQGQRGPPIILEATLHLAEIEDMPLFEPRVFTAGSEERVTCLPPKGLPEPSVWWEHAGVRLPTHGRVYQKGHELVLANIAESDAGVYTCHAANLAGQRRQDVNITVANGSSLPEWVTDNAGTLHFARVTRDDAGNYTCIASNGPQGQIRAHVQLTVAVFITFKVEPERTTVYQGHTALLQCEAQGDPKPLIQWKGKDRILDPTKLGPRMHIFQNGSLVIHDVAPEDSGRYTCIAGNSCNIKHTEAPLYVVDKPVPEESEGPGSPPPYKMIQTIGLSVGAAVAYIIAVLGLMFYCKKRCKAKRLQKQPEGEEPEMECLNGGPLQNGQPSAEIQEEVALTSLGSGPAATNKRHSTSDKMHFPRSSLQPITTLGKSEFGEVFLAKAQGLEEGVAETLVLVKSLQSKDEQQQLDFRRELEMFGKLNHANVVRLLGLCREAEPHYMVLEYVDLGDLKQFLRISKSKDEKLKSQPLSTKQKVALCTQVALGMEHLSNNRFVHKDLAARNCLVSAQRQVKVSALGLSKDVYNSEYYHFRQAWVPLRWMSPEAILEGDFSTKSDVWAFGVLMWEVFTHGEMPHGGQADDEVLADLQAGKARLPQPEGCPSKLYRLMQRCWALSPKDRPSFSEIASALGDSTVDSKP

SEQ ID NO: 1149 - protein, 1014 aa, Homo sapiens
MGAARGSPARPRRLPLLSVLLLPLLGGTQTAIVFIKQPSSQDALQGRRALLRCEVEAPGPVHVYWLLDGAPVQDTERRFAQGSSLSFAAVDRLQDSGTFQCVARDDVTGEEARSANASFNIKWIEAGPVVLKHPASEAEIQPQTQVTLRCHIDGHPRPTYQWFRDGTPLSDGQSNHTVSSKERNLTLRPAGPEHSGLYSCCAHSAFGQACSSQNFTLSIADESFARVVLAPQDVVVARYEEAMFHCQFSAQPPPSLQWLFEDETPITNRSRPPHLRRATVFANGSLLLTQVRPRNAGIYRCIGQGQRGPPIILEATLHLAEIEDMPLFEPRVFTAGSEERVTCLPPKGLPEPSVWWEHAGVRLPTHGRVYQKGHELVLANIAESDAGVYTCHAANLAGQRRQDVNITVATVPSWLKKPQDSQLEEGKPGYLDCLTQATPKPTVVWYRNQMLISEDSRFEVFKNGTLRINSVEVYDGTWYRCMSSTPAGSIEAQARVQVLEKLKFTPPPQPQQCMEFDKEATVPCSATGREKPTIKWERADGSSLPEWVTDNAGTLHFARVTRDDAGNYTCIASNGPQGQIRAHVQLTVAVFITFKVEPERTTVYQGHTALLQCEAQGDPKPLIQWKDKPVPEESEGPGSPPPYKMIQTIGLSVGAAVAYIIAVLGLMFYCKKRCKAKRLQKQPEGEEPEMECLNGGPLQNGQPSAEIQEEVALTSLGSGPAATNKRHSTSDKMHFPRSSLQPITTLGKSEFGEVFLAKAQGLEEGVAETLVLVKSLQSKDEQQQLDFRRELEMFGKLNHANVVRLLGLCREAEPHYMVLEYVDLGDLKQFLRISKSKDEKLKSQPLSTKQKVALCTQVALGMEHLSNNRFVHKDLAARNCLVSAQRQVKVSALGLSKDVYNSEYYHFRQAWVPLRWMSPEAILEGDFSTKSDVWAFGVLMWEVFTHGEMPHGGQADDEVLADLQAGKARLPQPEGCPSKLYRLMQRCWALSPKDRPSFSEIASALGDSTVDSKP

SEQ ID NO: 1150 - protein, 1070 aa, Homo sapiens
MGAARGSPARPRRLPLLSVLLLPLLGGTQTAIVFIKQPSSQDALQGRRALLRCEVEAPGPVHVYWLLDGAPVQDTERRFAQGSSLSFAAVDRLQDSGTFQCVARDDVTGEEARSANASFNIKWIEAGPVVLKHPASEAEIQPQTQVTLRCHIDGHPRPTYQWFRDGTPLSDGQSNHTVSSKERNLTLRPAGPEHSGLYSCCAHSAFGQACSSQNFTLSIADESFARVVLAPQDVVVARYEEAMFHCQFSAQPPPSLQWLFEDETPITNRSRPPHLRRATVFANGSLLLTQVRPRNAGIYRCIGQGQRGPPIILEATLHLAEIEDMPLFEPRVFTAGSEERVTCLPPKGLPEPSVWWEHAGVRLPTHGRVYQKGHELVLANIAESDAGVYTCHAANLAGQRRQDVNITVATVPSWLKKPQDSQLEEGKPGYLDCLTQATPKPTVVWYRNQMLISEDSRFEVFKNGTLRINSVEVYDGTWYRCMSSTPAGSIEAQARVQVLEKLKFTPPPQPQQCMEFDKEATVPCSATGREKPTIKWERADGSSLPEWVTDNAGTLHFARVTRDDAGNYTCIASNGPQGQIRAHVQLTVAVFITFKVEPERTTVYQGHTALLQCEAQGDPKPLIQWKGKDRILDPTKLGPRMHIFQNGSLVIHDVAPEDSGRYTCIAGNSCNIKHTEAPLYVVDKPVPEESEGPGSPPPYKMIQTIGLSVGAAVAYIIAVLGLMFYCKKRCKAKRLQKQPEGEEPEMECLNGGPLQNGQPSAEIQEEVALTSLGSGPAATNKRHSTSDKMHFPRSSLQPITTLGKSEFGEVFLAKAQGLEEGVAETLVLVKSLQSKDEQQQLDFRRELEMFGKLNHANVVRLLGLCREAEPHYMVLEYVDLGDLKQFLRISKSKDEKLKSQPLSTKQKVALCTQVALGMEHLSNNRFVHKDLAARNCLVSAQRQVKVSALGLSKDVYNSEYYHFRQAWVPLRWMSPEAILEGDFSTKSDVWAFGVLMWEVFTHGEMPHGGQADDEVLADLQAGKARLPQPEGCPSKLYRLMQRCWALSPKDRPSFSEIASALGDSTVDSKP

SEQ ID NO: 1151 - protein, 733 aa, Homo sapiens
MGAARGSPARPRRLPLLSVLLLPLLGGTQTAIVFIKQPSSQDALQGRRALLRCEVEAPGPVHVYWLLDGAPVQDTERRFAQGSSLSFAAVDRLQDSGTFQCVARDDVTGEEARSANASFNIKWIEAGPVVLKHPASEAEIQPQTQVTLRCHIDGHPRPTYQWFRDGTPLSDGQSNHTVSSKERNLTLRPAGPEHSGLYSCCAHSAFGQACSSQNFTLSIADESFARVVLAPQDVVVARYEEAMFHCQFSAQPPPSLQWLFEDETPITNRSRPPHLRRATVFANGSLLLTQVRPRNAGIYRCIGQGQRGPPIILEATLHLAEIEDMPLFEPRVFTAGSEERVTCLPPKGLPEPSVWWEHAGVRLPTHGRVYQKGHELVLANIAESDAGVYTCHAANLAGQRRQDVNITVATVPSWLKKPQDSQLEEGKPGYLDCLTQATPKPTVVWYRNQMLISEDSRFEVFKNGTLRINSVEVYDGTWYRCMSSTPAGSIEAQARVQVLEKLKFTPPPQPQQCMEFDKEATVPCSATGREKPTIKWERADGSSLPEWVTDNAGTLHFARVTRDDAGNYTCIASNGPQGQIRAHVQLTVAVFITFKVEPERTTVYQGHTALLQCEAQGDPKPLIQWKGKDRILDPTKLGPRMHIFQNGSLVIHDVAPEDSGRYTCIAGNSCNIKHTEAPLYVVGMGWGGLCCTGSGGPRRLSPCTQPLCTEHGTEAIFVAAVGIRPSHHAAAQS

SEQ ID NO: 1152 - protein, 644 aa, Homo sapiens
MGAARGSPARPRRLPLLSVLLLPLLGGTQTAIVFIKQPSSQDALQGRRALLRCEVEAPGPVHVYWLLDGAPVQDTERRFAQGSSLSFAAVDRLQDSGTFQCVARDDVTGEEARSANASFNIKWIEAGPVVLKHPASEAEIQPQTQVTLRCHIDGHPRPTYQWFRDGTPLSDGQSNHTVSSKERNLTLRPAGPEHSGLYSCCAHSAFGQACSSQNFTLSIADESFARVVLAPQDVVVARYEEAMFHCQFSAQPPPSLQWLFEDETPITNRSRPPHLRRATVFANGSLLLTQVRPRNAGIYRCIGQGQRGPPIILEATLHLAEIEDMPLFEPRVFTAGSEERVTCLPPKGLPEPSVWWEHAGVRLPTHGRVYQKGHELVLANIAESDAGVYTCHAANLAGQRRQDVNITVATVPSWLKKPQDSQLEEGKPGYLDCLTQATPKPTVVWYRNQMLISEDSRFEVFKNGTLRINSVEVYDGTWYRCMSSTPAGSIEAQARVQVLEKLKFTPPPQPQQCMEFDKEATVPCSATGREKPTIKWERADGSSLPEWVTDNAGTLHFARVTRDDAGNYTCIASNGPQGQIRAHVQLTVAVFITFKVEPERTTVYQGHTALLQCEAQGDPKPLIQWKGKDRILDPTKLGPRMAPW

SEQ ID NO: 1153 - protein, 459 aa, Homo sapiens
MGAARGSPARPRRLPLLSVLLLPLLGGTQTAIVFIKQPSSQDALQGRRALLRCEVEAPGPVHVYWLLDGAPVQDTERRFAQGSSLSFAAVDRLQDSGTFQCVARDDVTGEEARSANASFNIKWIEAGPVVLKHPASEAEIQPQTQVTLRCHIDGHPRPTYQWFRDGTPLSDGQSNHTVSSKERNLTLRPAGPEHSGLYSCCAHSAFGQACSSQNFTLSIADESFARVVLAPQDVVVARYEEAMFHCQFSAQPPPSLQWLFEDETPITNRSRPPHLRRATVFANGSLLLTQVRPRNAGIYRCIGQGQRGPPIILEATLHLAEIEDMPLFEPRVFTAGSEERVTCLPPKGLPEPSVWWEHAGVRLPTHGRVYQKGHELVLANIAESDAGVYTCHAANLAGQRRQDVNITVASEHLCPEGQGEVEGNTGLGVMDRGFPGTHLRSSQFWALQAWESVHYWESV

SEQ ID NO: 1154 - protein, 139 aa, Homo sapiens
MGAARGSPARPRRLPLLSVLLLPLLGGTQTAIVFIKQPSSQDALQGRRALLRCEVEAPGPVHVYWLLDGAPVQDTERRFAQGSSLSFAAVDRLQDSGTFQCVARDDVTGEEARSANASFNIKCESQGGCAQSPCQTLND

SEQ ID NO: 1155 - protein, 157 aa, Homo sapiens
MGAARGSPARPRRLPLLSVLLLPLLGGTQTAIVFIKQPSSQDALQGRRALLRCEVEAPGPVHVYWLLDGAPVQDTERRFAQGSSLSFAAVDRLQDSGTFQCVARDDVTGEEARSANASFNIKWIEAGPVVLKHPASEAEIQPQTQVTLRCHIDGHPR

SEQ ID NO: 1156 - protein, 231 aa, Homo sapiens
MGAARGSPARPRRLPLLSVLLLPLLGGTQTAIVFIKQPSSQDALQGRRALLRCEVEAPGPVHVYWLLDGAPVQDTERRFAQGSSLSFAAVDRLQDSGTFQCVARDDVTGEEARSANASFNIKWIEAGPVVLKHPASEAEIQPQTQVTLRCHIDGHPRPTYQWFRDGTPLSDGQSNHTVSSKERNLTLRPAGPEHSGLYSCCAHSAFGQACSSQNFTLSIAGEPGVGAEGMR

SEQ ID NO: 1157 - DNA, 3001 bp, Homo sapiens
ggagtttattcataacgcgctctccaagtatacgtggcaatgcgttgctgggttattttaatcattctaggcatcgttttcctccttatgcctctatcattcctccctatctacactaacatcccacgctctgaacgcgcgcccattaatacccttctttcctccactctccctgggactcttgatcaaagcgcggccctttccccagccttagcgaggcgccctgcagcctggtacgcgcgtggcgtggcggtgggcgcgcagtgcgttctcggtgtggagggcagctgttccgcctgcgatgatttatactcacaggacaaggatgcggtttgtcaaacagtactgctacggaggagcagcagagaaagggagagggtttgagagggagcaaaagaaaatggtaggcgcgcgtagttaattcatgcggctctcttactctgtttacatcctagagctagagtgctcggctgcccggctgagtctcctccccaccttccccaccctccccaccctccccataagcgcccctcccgggttcccaaagcagagggcgtgggggaaaagaaaaaagatcctctctcgctaatctccgcccaccggccctttataatgcgagggtctggacggctgaggacccccgagctgtgctgctcgcggccgccaccgccgggccccggccgtccctggctcccctcctgcctcgagaagggcagggcttctcagaggcttggcgggaaaaagaacggagggagggatcgcgctgagtataaaagccggttttcggggctttatctaactcgctgtagtaattccagcgagaggcagagggagcgagcgggcggccggctagggtggaagagccgggcgagcagagctgcgctgcgggcgtcctgggaagggagatccggagcgaatagggggcttcgcctctggcccagccctcccgctgatcccccagccagcggtccgcaacccttgccgcatccacgaaactttgcccatagcagcgggcgggcactttgcactggaacttacaacacccgagcaaggacgcgactctcccgacgcggggaggctattctgcccatttggggacacttccccgccgctgccaggacccgcttctctgaaaggctctccttgcagctgcttagacgctggatttttttcgggtagtggaaaaccagcagcctcccgcgacgatgcccctcaacgttagcttcaccaacaggaactatgacctcgactacgactcggtgcagccgtatttctactgcgacgaggaggagaacttctaccagcagcagcagcagagcgagctgcagcccccggcgcccagcgaggatatctggaagaaattcgagctgctgcccaccccgcccctgtcccctagccgccgctccgggctctgctcgccctcctacgttgcggtcacacccttctcccttcggggagacaacgacggcggtggcgggagcttctccacggccgaccagctggagatggtgaccgagctgctgggaggagacatggtgaaccagagtttcatctgcgacccggacgacgagaccttcatcaaaaacatcatcatccaggactgtatgtggagcggcttctcggccgccgccaagctcgtctcagagaagctggcctcctaccaggctgcgcgcaaagacagcggcagcccgaaccccgcccgcggccacagcgtctgctccacctccagcttgtacctgcaggatctgagcgccgccgcctcagagtgcatcgacccctcggtggtcttcccctaccctctcaacgacagcagctcgcccaagtcctgcgcctcgcaagactccagcgccttctctccgtcctcggattctctgctctcctcgacggagtcctccccgcagggcagccccgagcccctggtgctccatgaggagacaccgcccaccaccagcagcgactctgaggaggaacaagaagatgaggaagaaatcgatgttgtttctgtggaaaagaggcaggctcctggcaaaaggtcagagtctggatcaccttctgctggaggccacagcaaacctcctcacagcccactggtcctcaagaggtgccacgtctccacacatcagcacaactacgcagcgcctccctccactcggaaggactatcctgctgccaagagggtcaagttggacagtgtcagagtcctgagacagatcagcaacaaccgaaaatgcaccagccccaggtcctcggacaccgaggagaatgtcaagaggcgaacacacaacgtcttggagcgccagaggaggaacgagctaaaacggagcttttttgccctgcgtgaccagatcccggagttggaaaacaatgaaaaggcccccaaggtagttatccttaaaaaagccacagcatacatcctgtccgtccaagcagaggagcaaaagctcatttctgaagaggacttgttgcggaaacgacgagaacagttgaaacacaaacttgaacagctacggaactcttgtgcgtaaggaaaagtaaggaaaacgattccttctaacagaaatgtcctgagcaatcacctatgaacttgtttcaaatgcatgatcaaatgcaacctcacaaccttggctgagtcttgagactgaaagatttagccataatgtaaactgcctcaaattggactttgggcataaaagaacttttttatgcttaccatcttttttttttctttaacagatttgtatttaagaattgtttttaaaaaattttaagatttacacaatgtttctctgtaaatattgccattaaatgtaaataactttaataaaacgtttatagcagttacacagaatttcaatcctagtatatagtacctagtattataggtactataaaccctaattttttttatttaagtacattttgctttttaaagttgatttttttctattgtttttagaaaaaataaaataactggcaaatatatcattgagccaaatcttaa

SEQ ID NO: 1158 - DNA, 4625 bp, Homo sapiens
ggagtttattcataacgcgctctccaagtatacgtggcaatgcgttgctgggttattttaatcattctaggcatcgttttcctccttatgcctctatcattcctccctatctacactaacatcccacgctctgaacgcgcgcccattaatacccttctttcctccactctccctgggactcttgatcaaagcgcggccctttccccagccttagcgaggcgccctgcagcctggtacgcgcgtggcgtggcggtgggcgcgcagtgcgttctcggtgtggagggcagctgttccgcctgcgatgatttatactcacaggacaaggatgcggtttgtcaaacagtactgctacggaggagcagcagagaaagggagagggtttgagagggagcaaaagaaaatggtaggcgcgcgtagttaattcatgcggctctcttactctgtttacatcctagagctagagtgctcggctgcccggctgagtctcctccccaccttccccaccctccccaccctccccataagcgcccctcccgggttcccaaagcagagggcgtgggggaaaagaaaaaagatcctctctcgctaatctccgcccaccggccctttataatgcgagggtctggacggctgaggacccccgagctgtgctgctcgcggccgccaccgccgggccccggccgtccctggctcccctcctgcctcgagaagggcagggcttctcagaggcttggcgggaaaaagaacggagggagggatcgcgctgagtataaaagccggttttcggggctttatctaactcgctgtagtaattccagcgagaggcagagggagcgagcgggcggccggctagggtggaagagccgggcgagcagagctgcgctgcgggcgtcctgggaagggagatccggagcgaatagggggcttcgcctctggcccagccctcccgctgatcccccagccagcggtccgcaacccttgccgcatccacgaaactttgcccatagcagcgggcgggcactttgcactggaacttacaacacccgagcaaggacgcgactctcccgacgcggggaggctattctgcccatttggggacacttccccgccgctgccaggacccgcttctctgaaaggctctccttgcagctgcttagacgctggatttttttcgggtagtggaaaaccaggtaagcaccgaagtccacttgccttttaatttatttttttatcactttaatgctgagatgagtcgaatgcctaaatagggtgtcttttctcccattcctgcgctattgacacttttctcagagtagttatggtaactggggctggggtggggggtaatccagaactggatcggggtaaagtgacttgtcaagatgggagaggagaaggcagagggaaaacgggaatggtttttaagactaccctttcgagatttctgccttatgaatatattcacgctgactcccggccggtcggacattcctgctttattgtgttaattgctctctgggttttggggggctgggggttgctttgcggtgggcagaaagccccttgcatcctgagctccttggagtagggaccgcatatcgcctgtgtgagccagatcgctccgcagccgctgacttgtccccgtctccgggagggcatttaaatttcggctcaccgcatttctgacagccggagacggacactgcggcgcgtcccgcccgcctgtccccgcggcgattccaacccgccctgatccttttaagaagttggcatttggctttttaaaaagcaataatacaatttaaaacctgggtctctagaggtgttaggacgtggtgttgggtaggcgcaggcaggggaaaagggaggcgaggatgtgtccgattctcctggaatcgttgacttggaaaaaccagggcgaatctccgcacccagccctgactcccctgccgcggccgccctcgggtgtcctcgcgcccgagatgcggaggaactgcgaggagcggggctctgggcggttccagaacagctgctacccttggtggggtggctccgggggaggtatcgcagcggggtctctggcgcagttgcatctccgtattgagtgcgaagggaggtgcccctattattatttgacaccccccttgtatttatggaggggtgttaaagcccgcggctgagctcgccactccagccggcgagagaaagaagaaaagctggcaaaaggagtgttggacgggggcggtactgggggtggggacgggggcggtggagagggaaggttgggaggggctgcggtgccggcgggggtaggagagcggctagggcgcgagtgggaacagccgcagcggaggggccccggcgcggagcggggttcacgcagccgctagcgcccaggcgcctctcgccttctccttcaggtggcgcaaaactttgtgccttggattttgtcaaattgttttcctcaccgccacctcccgcggcttcttaagggcgccagggccgatttcgattcctctgccgctgcggggccgactcccgggctttgcgctccgggctcccgggggagcgggggctcggcgggcaccaagccgctggttcactaagtgcgtctccgagatagcaggggactgtccaaagggggtgaaagggtgctccctttattcccccaccaagaccacccagccgctttaggggatagctctgcaaggggagaggttcgggactgtggcgcgcactgcgcgctgcgccaggtttccgcaccaagacccctttaactcaagactgcctcccgctttgtgtgccccgctccagcagcctcccgcgacgatgcccctcaacgttagcttcaccaacaggaactatgacctcgactacgactcggtgcagccgtatttctactgcgacgaggaggagaacttctaccagcagcagcagcagagcgagctgcagcccccggcgcccagcgaggatatctggaagaaattcgagctgctgcccaccccgcccctgtcccctagccgccgctccgggctctgctcgccctcctacgttgcggtcacacccttctcccttcggggagacaacgacggcggtggcgggagcttctccacggccgaccagctggagatggtgaccgagctgctgggaggagacatggtgaaccagagtttcatctgcgacccggacgacgagaccttcatcaaaaacatcatcatccaggactgtatgtggagcggcttctcggccgccgccaagctcgtctcagagaagctggcctcctaccaggctgcgcgcaaagacagcggcagcccgaaccccgcccgcggccacagcgtctgctccacctccagcttgtacctgcaggatctgagcgccgccgcctcagagtgcatcgacccctcggtggtcttcccctaccctctcaacgacagcagctcgcccaagtcctgcgcctcgcaagactccagcgccttctctccgtcctcggattctctgctctcctcgacggagtcctccccgcagggcagccccgagcccctggtgctccatgaggagacaccgcccaccaccagcagcgactctgaggaggaacaagaagatgaggaagaaatcgatgttgtttctgtggaaaagaggcaggctcctggcaaaaggtcagagtctggatcaccttctgctggaggccacagcaaacctcctcacagcccactggtcctcaagaggtgccacgtctccacacatcagcacaactacgcagcgcctccctccactcggaaggactatcctgctgccaagagggtcaagttggacagtgtcagagtcctgagacagatcagcaacaaccgaaaatgcaccagccccaggtcctcggacaccgaggagaatgtcaagaggcgaacacacaacgtcttggagcgccagaggaggaacgagctaaaacggagcttttttgccctgcgtgaccagatcccggagttggaaaacaatgaaaaggcccccaaggtagttatccttaaaaaagccacagcatacatcctgtccgtccaagcagaggagcaaaagctcatttctgaagaggacttgttgcggaaacgacgagaacagttgaaacacaaacttgaacagctacggaactcttgtgcgtaaggaaaagtaaggaaaacgattccttctaacagaaatgtcctgagcaatcacctatgaacttgtttcaaatgcatgatcaaatgcaacctcacaaccttggctgagtcttgagactgaaagatttagccataatgtaaactgcctcaaattggactttgggcataaaagaacttttttatgcttaccatcttttttttttctttaacagatttgtatttaagaattgtttttaaaaaattttaagatttacacaatgtttctctgtaaatattgccattaaatgtaaataactttaataaaacgtttatagcagttacacagaatttcaatcctagtatatagtacctagtattataggtactataaaccctaattttttttatttaagtacattttgctttttaaagttgatttttttctattgtttttagaaaaaataaaataactggcaaatatatcattgagccaaatcttaa

SEQ ID NO: 1159 - DNA, 2841 bp, Homo sapiens
ggagtttattcataacgcgctctccaagtatacgtggcaatgcgttgctgggttattttaatcattctaggcatcgttttcctccttatgcctctatcattcctccctatctacactaacatcccacgctctgaacgcgcgcccattaatacccttctttcctccactctccctgggactcttgatcaaagcgcggccctttccccagccttagcgaggcgccctgcagcctggtacgcgcgtggcgtggcggtgggcgcgcagtgcgttctcggtgtggagggcagctgttccgcctgcgatgatttatactcacaggacaaggatgcggtttgtcaaacagtactgctacggaggagcagcagagaaagggagagggtttgagagggagcaaaagaaaatggtaggcgcgcgtagttaattcatgcggctctcttactctgtttacatcctagagctagagtgctcggctgcccggctgagtctcctccccaccttccccaccctccccaccctccccataagcgcccctcccgggttcccaaagcagagggcgtgggggaaaagaaaaaagatcctctctcgctaatctccgcccaccggccctttataatgcgagggtctggacggctgaggacccccgagctgtgctgctcgcggccgccaccgccgggccccggccgtccctggctcccctcctgcctcgagaagggcagggcttctcagaggcttggcgggaaaaagaacggagggagggatcgcgctgagtataaaagccggttttcggggctttatctaactcgctgtagtaattccagcgagaggcagagggagcgagcgggcggccggctagggtggaagagccgggcgagcagagctgcgctgcgggcgtcctgggaagggagatccggagcgaatagggggcttcgcctctggcccagccctcccgctgatcccccagccagcggtccgcaacccttgccgcatccacgaaactttgcccatagcagcgggcgggcactttgcactggaacttacaacacccgagcaaggacgcgactctcccgacgcggggaggctattctgcccatttggggacacttccccgccgctgccaggacccgcttctctgaaaggctctccttgcagctgcttagacgctggatttttttcgggtagtggaaaaccagcagcctcccgcgacgatgcccctcaacgttagcttcaccaacaggaactatgacctcgactacgactcggtgcagccgtatttctactgcgacgaggaggagaacttctaccagcagcagcagcagagcgagctgcagcccccggcgcccagcgaggatatctggaagaaattcgagctgctgcccaccccgcccctgtcccctagccgccgctccgggctctgctcgccctcctacgttgcggtcacacccttctcccttcggggagacaacgacggcggtggcgggagcttctccacggccgaccagctggagatggtgaccgagctgctgggaggagacatggtgaaccagagtttcatctgcgacccggacgacgagaccttcatcaaaaacatcatcatccaggactgtatgtggagcggcttctcggccgccgccaagctcgtctcagagaagctggcctcctaccaggctgcgcgcaaagacagcggcagcccgaaccccgcccgcggccacagcgtctgctccacctccagcttgtacctgcaggatctgagcgccgccgcctcagagtgcatcgacccctcggtggtcttcccctaccctctcaacgacagcagctcgcccaagtcctgcgcctcgcaagactccagcgccttctctccgtcctcggattctctgctctcctcgacggagtcctccccgcagggcagccccgagcccctggtgctccatgaggagacaccgcccaccaccagcagcgactctgaggaggaacaagaagatgaggaagaaatcgatgttgtttctgtggaaaagaggcaggctcctggcaaaaggtcagagtctggatcaccttctgctggaggccacagcaaacctcctcacagcccactggtcctcaagaggtgccacgtctccacacatcagcacaactacgcagcgcctccctccactcggaaggactatcctgctgccaagagggtcaagttggacagtgtcagagtcctgagacagatcagcaacaaccgaaaatgcaccagccccaggtcctcggacaccgaggagaatgtcaagaggcgaacacacaacgtcttggagcgccagaggaggaacgagctaaaacggagcttttttgccctgcgtgaccagatcccggagttggaaaacaatgaaaaggcccccaaggtagttatccttaaaaaagccacagcatacatcctgtccgtccaagcagaggagcaaaagctcatttctgaagaggacttgttgcggaaacgacgagaacagttgaaacacaaacttgaacagctacggaactcttgtgcgtaaggaaaagtaaggaaaacgattccttctaacagaaatgtcctgagcaatcacctatgaacttgtttcaaatgcatgatcaaatgcaacctcacaaccttggctgagtcttgagactgaaagatttagccataatgtaaactgcctcaaattggactttgggcataaaagaacttttttatgcttaccatcttttttttttctttaacagatttgtatttaagaattgtttttaaaaaattttaagatttacacaatgtttctctgtaaatattgccattaaatgtaaataactttaataaaacgtttatagcagtta

SEQ ID NO: 1160 - DNA, 4539 bp, Homo sapiens
ggagtttattcataacgcgctctccaagtatacgtggcaatgcgttgctgggttattttaatcattctaggcatcgttttcctccttatgcctctatcattcctccctatctacactaacatcccacgctctgaacgcgcgcccattaatacccttctttcctccactctccctgggactcttgatcaaagcgcggccctttccccagccttagcgaggcgccctgcagcctggtacgcgcgtggcgtggcggtgggcgcgcagtgcgttctcggtgtggagggcagctgttccgcctgcgatgatttatactcacaggacaaggatgcggtttgtcaaacagtactgctacggaggagcagcagagaaagggagagggtttgagagggagcaaaagaaaatggtaggcgcgcgtagttaattcatgcggctctcttactctgtttacatcctagagctagagtgctcggctgcccggctgagtctcctccccaccttccccaccctccccaccctccccataagcgcccctcccgggttcccaaagcagagggcgtgggggaaaagaaaaaagatcctctctcgctaatctccgcccaccggccctttataatgcgagggtctggacggctgaggacccccgagctgtgctgctcgcggccgccaccgccgggccccggccgtccctggctcccctcctgcctcgagaagggcagggcttctcagaggcttggcgggaaaaagaacggagggagggatcgcgctagggtggaagagccgggcgagcagagctgcgctgcgggcgtcctgggaagggagatccggagcgaatagggggcttcgcctctggcccagccctcccgctgatcccccagccagcggtccgcaacccttgccgcatccacgaaactttgcccatagcagcgggcgggcactttgcactggaacttacaacacccgagcaaggacgcgactctcccgacgcggggaggctattctgcccatttggggacacttccccgccgctgccaggacccgcttctctgaaaggctctccttgcagctgcttagacgctggatttttttcgggtagtggaaaaccaggtaagcaccgaagtccacttgccttttaatttatttttttatcactttaatgctgagatgagtcgaatgcctaaatagggtgtcttttctcccattcctgcgctattgacacttttctcagagtagttatggtaactggggctggggtggggggtaatccagaactggatcggggtaaagtgacttgtcaagatgggagaggagaaggcagagggaaaacgggaatggtttttaagactaccctttcgagatttctgccttatgaatatattcacgctgactcccggccggtcggacattcctgctttattgtgttaattgctctctgggttttggggggctgggggttgctttgcggtgggcagaaagccccttgcatcctgagctccttggagtagggaccgcatatcgcctgtgtgagccagatcgctccgcagccgctgacttgtccccgtctccgggagggcatttaaatttcggctcaccgcatttctgacagccggagacggacactgcggcgcgtcccgcccgcctgtccccgcggcgattccaacccgccctgatccttttaagaagttggcatttggctttttaaaaagcaataatacaatttaaaacctgggtctctagaggtgttaggacgtggtgttgggtaggcgcaggcaggggaaaagggaggcgaggatgtgtccgattctcctggaatcgttgacttggaaaaaccagggcgaatctccgcacccagccctgactcccctgccgcggccgccctcgggtgtcctcgcgcccgagatgcggaggaactgcgaggagcggggctctgggcggttccagaacagctgctacccttggtggggtggctccgggggaggtatcgcagcggggtctctggcgcagttgcatctccgtattgagtgcgaagggaggtgcccctattattatttgacaccccccttgtatttatggaggggtgttaaagcccgcggctgagctcgccactccagccggcgagagaaagaagaaaagctggcaaaaggagtgttggacgggggcggtactgggggtggggacgggggcggtggagagggaaggttgggaggggctgcggtgccggcgggggtaggagagcggctagggcgcgagtgggaacagccgcagcggaggggccccggcgcggagcggggttcacgcagccgctagcgcccaggcgcctctcgccttctccttcaggtggcgcaaaactttgtgccttggattttgtcaaattgttttcctcaccgccacctcccgcggcttcttaagggcgccagggccgatttcgattcctctgccgctgcggggccgactcccgggctttgcgctccgggctcccgggggagcgggggctcggcgggcaccaagccgctggttcactaagtgcgtctccgagatagcaggggactgtccaaagggggtgaaagggtgctccctttattcccccaccaagaccacccagccgctttaggggatagctctgcaaggggagaggttcgggactgtggcgcgcactgcgcgctgcgccaggtttccgcaccaagacccctttaactcaagactgcctcccgctttgtgtgccccgctccagcagcctcccgcgacgatgcccctcaacgttagcttcaccaacaggaactatgacctcgactacgactcggtgcagccgtatttctactgcgacgaggaggagaacttctaccagcagcagcagcagagcgagctgcagcccccggcgcccagcgaggatatctggaagaaattcgagctgctgcccaccccgcccctgtcccctagccgccgctccgggctctgctcgccctcctacgttgcggtcacacccttctcccttcggggagacaacgacggcggtggcgggagcttctccacggccgaccagctggagatggtgaccgagctgctgggaggagacatggtgaaccagagtttcatctgcgacccggacgacgagaccttcatcaaaaacatcatcatccaggactgtatgtggagcggcttctcggccgccgccaagctcgtctcagagaagctggcctcctaccaggctgcgcgcaaagacagcggcagcccgaaccccgcccgcggccacagcgtctgctccacctccagcttgtacctgcaggatctgagcgccgccgcctcagagtgcatcgacccctcggtggtcttcccctaccctctcaacgacagcagctcgcccaagtcctgcgcctcgcaagactccagcgccttctctccgtcctcggattctctgctctcctcgacggagtcctccccgcagggcagccccgagcccctggtgctccatgaggagacaccgcccaccaccagcagcgactctgaggaggaacaagaagatgaggaagaaatcgatgttgtttctgtggaaaagaggcaggctcctggcaaaaggtcagagtctggatcaccttctgctggaggccacagcaaacctcctcacagcccactggtcctcaagaggtgccacgtctccacacatcagcacaactacgcagcgcctccctccactcggaaggactatcctgctgccaagagggtcaagttggacagtgtcagagtcctgagacagatcagcaacaaccgaaaatgcaccagccccaggtcctcggacaccgaggagaatgtcaagaggcgaacacacaacgtcttggagcgccagaggaggaacgagctaaaacggagcttttttgccctgcgtgaccagatcccggagttggaaaacaatgaaaaggcccccaaggtagttatccttaaaaaagccacagcatacatcctgtccgtccaagcagaggagcaaaagctcatttctgaagaggacttgttgcggaaacgacgagaacagttgaaacacaaacttgaacagctacggaactcttgtgcgtaaggaaaagtaaggaaaacgattccttctaacagaaatgtcctgagcaatcacctatgaacttgtttcaaatgcatgatcaaatgcaacctcacaaccttggctgagtcttgagactgaaagatttagccataatgtaaactgcctcaaattggactttgggcataaaagaacttttttatgcttaccatcttttttttttctttaacagatttgtatttaagaattgtttttaaaaaattttaagatttacacaatgtttctctgtaaatattgccattaaatgtaaataactttaataaaacgtttatagcagttacacagaatttcaatcctagtatatagtacctagtattataggtactataaaccctaattttttttatttaagtacattttgctttttaaagttgatttttttctattgtttttagaaaaaataaaataactggcaaatatatcattgagccaaatcttaa

SEQ ID NO: 1161 - DNA, 4377 bp, Homo sapiens
ggagtttattcataacgcgctctccaagtatacgtggcaatgcgttgctgggttattttaatcattctaggcatcgttttcctccttatgcctctatcattcctccctatctacactaacatcccacgctctgaacgcgcgcccattaatacccttctttcctccactctccctgggactcttgatcaaagcgcggccctttccccagccttagcgaggcgccctgcagcctggtacgcgcgtggcgtggcggtgggcgcgcagtgcgttctcggtgtggagggcagctgttccgcctgcgatgatttatactcacaggacaaggatgcggtttgtcaaacagtactgctacggaggagcagcagagaaagggagagggtttgagagggagcaaaagaaaatggtaggcgcgcgtagttaattcatgcggctctcttactctgtttacatcctagagctagagtgctcggctgcccggctgagtctcctccccaccttccccaccctccccaccctccccataagcgcccctcccgggttcccaaagcagagggcgtgggggaaaagaaaaaagatcctctctcgctaatctccgcccaccggccctttataatgcgagggtctggacggctgaggacccccgagctgtgctgctcgcggccgccaccgccgggccccggccgtccctggctcccctcctgcctcgagaagggcagggcttctcagaggcttggcgggaaaaagaacggagggagggatcgcgctgagtataaaagccggttttcggggctttatctaactcgctgtagtaattccagcgagaggcagagggagcgagcgggcggccggctagggtggaagagccgggcgagcagagctgcgctgcgggcgtcctgggaagggagatccggagcgaatagggggcttcgcctctggcccagccctcccgctgatcccccagccagcggtccgcaacccttgccgcatccacgaaactttgcccatagcagcgggcgggcactttgcactggaacttacaacacccgagcaaggacgcgactctcccgacgcggggaggctattctgcccatttggggacacttccccgccgctgccaggacccgcttctctgaaaggctctccttgcagctgcttagacgctggatttttttcgggtagtggaaaaccagcagcctcccgcgacgatgcccctcaacgttagcttcaccaacaggaactatgacctcgactacgactcggtgcagccgtatttctactgcgacgaggaggagaacttctaccagcagcagcagcagagcgagctgcagcccccggcgcccagcgaggatatctggaagaaattcgagctgctgcccaccccgcccctgtcccctagccgccgctccgggctctgctcgccctcctacgttgcggtcacacccttctcccttcggggagacaacgacggcggtggcgggagcttctccacggccgaccagctggagatggtgaccgagctgctgggaggagacatggtgaaccagagtttcatctgcgacccggacgacgagaccttcatcaaaaacatcatcatccaggactgtatgtggagcggcttctcggccgccgccaagctcgtctcagagaagctggcctcctaccaggctgcgcgcaaagacagcggcagcccgaaccccgcccgcggccacagcgtctgctccacctccagcttgtacctgcaggatctgagcgccgccgcctcagagtgcatcgacccctcggtggtcttcccctaccctctcaacgacagcagctcgcccaagtcctgcgcctcgcaagactccagcgccttctctccgtcctcggattctctgctctcctcgacggagtcctccccgcagggcagccccgagcccctggtgctccatgaggagacaccgcccaccaccagcagcgactctggtaagcgaagcccgcccaggcctgtcaaaagtgggcggctggatacctttcccattttcattggcagcttatttaacgggccactcttattaggaaggagagatagcagatctggagagatttgggagctcatcacctctgaaaccttgggctttagcgtttcctcccatcccttccccttagactgcccatgtttgcagcccccctccccgtttgtctcccacccctcaggaatttcatttaggtttttaaaccttctggcttatcttacaactcaatccacttcttcttacctcccgttaacattttaattgccctggggcggggtggcagggagtgtatgaatgaggataagagaggattgatctctgagagtgaatgaattgcttccctcttaacttccgagaagtggtgggatttaatgaactatctacaaaaatgaggggctgtgtttagaggctaggcagggcctgcctgagtgcgggagccagtgaactgcctcaagagtgggtgggctgaggagctgggatcttctcagcctattttgaacactgaaaagcaaatccttgccaaagttggacttttttttttcttttattccttcccccgccctcttggacttttggcaaaactgcaatttttttttttttatttttcatttccagtaaaatagggagttgctaaagtcataccaagcaatttgcagctatcatttgcaacacctgaagtgttcttggtaaagtccctcaaaaataggaggtgcttgggaatgtgctttgctttgggtgtgtccaaagcctcattaagtcttaggtaagaattggcatcaatgtcctatcctgggaagttgcacttttcttgtccatgccataacccagctgtctttccctttatgagactcttaccttcatggtgagaggagtaagggtggctggctagattggttcttttttttttttttcccttttttaagacggagtctcactctgtcactaggctggagtgcagtggcgcaatcaacctccaaccccctggttcaagagattctcctgcctcagcctcccaagtagctgggactacaggtgcacaccaccatgccaggctaatttttgtaattttagtagagatggggtttcatcgtgttggccaggatggtctctcctgacctcacgatccgcccacctcggcctcccaaagtgctgggattacaggtgtgagccagggcaccaggcttagatgtggctctttggggagataattttgtccagagacctttctaacgtattcatgccttgtatttgtacagcattaatctggtaattgattattttaatgtaaccttgctaaaggagtgatttctatttcctttcttaaagaggaggaacaagaagatgaggaagaaatcgatgttgtttctgtggaaaagaggcaggctcctggcaaaaggtcagagtctggatcaccttctgctggaggccacagcaaacctcctcacagcccactggtcctcaagaggtgccacgtctccacacatcagcacaactacgcagcgcctccctccactcggaaggactatcctgctgccaagagggtcaagttggacagtgtcagagtcctgagacagatcagcaacaaccgaaaatgcaccagccccaggtcctcggacaccgaggagaatgtcaagaggcgaacacacaacgtcttggagcgccagaggaggaacgagctaaaacggagcttttttgccctgcgtgaccagatcccggagttggaaaacaatgaaaaggcccccaaggtagttatccttaaaaaagccacagcatacatcctgtccgtccaagcagaggagcaaaagctcatttctgaagaggacttgttgcggaaacgacgagaacagttgaaacacaaacttgaacagctacggaactcttgtgcgtaaggaaaagtaaggaaaacgattccttctaacagaaatgtcctgagcaatcacctatgaacttgtttcaaatgcatgatcaaatgcaacctcacaaccttggctgagtcttgagactgaaagatttagccataatgtaaactgcctcaaattggactttgggcataaaagaacttttttatgcttaccatcttttttttttctttaacagatttgtatttaagaattgtttttaaaaaattttaagatttacacaatgtttctctgtaaatattgccattaaatgtaaataactttaataaaacgtttatagcagttacacagaatttcaatcctagtatatagtacctagtattataggtactataaaccctaattttttttatttaagtacattttgctttttaaagttgatttttttctattgtttttagaaaaaataaaataactggcaaatatatcattgagccaaatcttaa

SEQ ID NO: 1162 - DNA, 2397 bp, Homo sapiens
ggagtttattcataacgcgctctccaagtatacgtggcaatgcgttgctgggttattttaatcattctaggcatcgttttcctccttatgcctctatcattcctccctatctacactaacatcccacgctctgaacgcgcgcccattaatacccttctttcctccactctccctgggactcttgatcaaagcgcggccctttccccagccttagcgaggcgccctgcagcctggtacgcgcgtggcgtggcggtgggcgcgcagtgcgttctcggtgtggagggcagctgttccgcctgcgatgatttatactcacaggacaaggatgcggtttgtcaaacagtactgctacggaggagcagcagagaaagggagagggtttgagagggagcaaaagaaaatgcagcgggcgggcactttgcactggaacttacaacacccgagcaaggacgcgactctcccgacgcggggaggctattctgcccatttggggacacttccccgccgctgccaggacccgcttctctgaaaggctctccttgcagctgcttagacgctggatttttttcgggtagtggaaaaccagcagcctcccgcgacgatgcccctcaacgttagcttcaccaacaggaactatgacctcgactacgactcggtgcagccgtatttctactgcgacgaggaggagaacttctaccagcagcagcagcagagcgagctgcagcccccggcgcccagcgaggatatctggaagaaattcgagctgctgcccaccccgcccctgtcccctagccgccgctccgggctctgctcgccctcctacgttgcggtcacacccttctcccttcggggagacaacgacggcggtggcgggagcttctccacggccgaccagctggagatggtgaccgagctgctgggaggagacatggtgaaccagagtttcatctgcgacccggacgacgagaccttcatcaaaaacatcatcatccaggactgtatgtggagcggcttctcggccgccgccaagctcgtctcagagaagctggcctcctaccaggctgcgcgcaaagacagcggcagcccgaaccccgcccgcggccacagcgtctgctccacctccagcttgtacctgcaggatctgagcgccgccgcctcagagtgcatcgacccctcggtggtcttcccctaccctctcaacgacagcagctcgcccaagtcctgcgcctcgcaagactccagcgccttctctccgtcctcggattctctgctctcctcgacggagtcctccccgcagggcagccccgagcccctggtgctccatgaggagacaccgcccaccaccagcagcgactctgaggaggaacaagaagatgaggaagaaatcgatgttgtttctgtggaaaagaggcaggctcctggcaaaaggtcagagtctggatcaccttctgctggaggccacagcaaacctcctcacagcccactggtcctcaagaggtgccacgtctccacacatcagcacaactacgcagcgcctccctccactcggaaggactatcctgctgccaagagggtcaagttggacagtgtcagagtcctgagacagatcagcaacaaccgaaaatgcaccagccccaggtcctcggacaccgaggagaatgtcaagaggcgaacacacaacgtcttggagcgccagaggaggaacgagctaaaacggagcttttttgccctgcgtgaccagatcccggagttggaaaacaatgaaaaggcccccaaggtagttatccttaaaaaagccacagcatacatcctgtccgtccaagcagaggagcaaaagctcatttctgaagaggacttgttgcggaaacgacgagaacagttgaaacacaaacttgaacagctacggaactcttgtgcgtaaggaaaagtaaggaaaacgattccttctaacagaaatgtcctgagcaatcacctatgaacttgtttcaaatgcatgatcaaatgcaacctcacaaccttggctgagtcttgagactgaaagatttagccataatgtaaactgcctcaaattggactttgggcataaaagaacttttttatgcttaccatcttttttttttctttaacagatttgtatttaagaattgtttttaaaaaattttaagatttacacaatgtttctctgtaaatattgccattaaatgtaaataactttaataaaacgtttatagcagttacacagaatttcaatcctagtatatagtacctagtattataggtactataaaccctaattttttttatttaagtacattttgctttttaaagttgatttttttctattgtttttagaaaaaataaaataactggcaaatatatcattgagccaaatcttaa

SEQ ID NO: 1163 - DNA, 3028 bp, Homo sapiens
ggagtttattcataacgcgctctccaagtatacgtggcaatgcgttgctgggttattttaatcattctaggcatcgttttcctccttatgcctctatcattcctccctatctacactaacatcccacgctctgaacgcgcgcccattaatacccttctttcctccactctccctgggactcttgatcaaagcgcggccctttccccagccttagcgaggcgccctgcagcctggtacgcgcgtggcgtggcggtgggcgcgcagtgcgttctcggtgtggagggcagctgttccgcctgcgatgatttatactcacaggacaaggatgcggtttgtcaaacagtactgctacggaggagcagcagagaaagggagagggtttgagagggagcaaaagaaaatggtaggcgcgcgtagttaattcatgcggctctcttactctgtttacatcctagagctagagtgctcggctgcccggctgagtctcctccccaccttccccaccctccccaccctccccataagcgcccctcccgggttcccaaagcagagggcgtgggggaaaagaaaaaagatcctctctcgctaatctccgcccaccggccctttataatgcgagggtctggacggctgaggacccccgagctgtgctgctcgcggccgccaccgccgggccccggccgtccctggctcccctcctgcctcgagaagggcagggcttctcagaggcttggcgggaaaaagaacggagggagggatcgcgctgagtataaaagccggttttcggggctttatctaactcgctgtagtaattccagcgagaggcagagggagcgagcgggcggccggctagggtggaagagccgggcgagcagagctgcgctgcgggcgtcctgggaagggagatccggagcgaatagggggcttcgcctctggcccagccctcccgctgatcccccagccagcggtccgcaacccttgccgcatccacgaaactttgcccatagcagcgggcgggcactttgcactggaacttacaacacccgagcaaggacgcgactctcccgacgcggggaggctattctgcccatttggggacacttccccgccgctgccaggacccgcttctctgaaaggctctccttgcagctgcttagacgctggatttttttcgggtagtggaaaaccagcagcctcccgcgacgatgcccctcaacgttagcttcaccaacaggaactatgacctcgactacgactcggtgcagccgtatttctactgcgacgaggaggagaacttctaccagcagcagcagcagagcgagctgcagcccccggcgcccagcgaggatatctggaagaaattcgagctgctgcccaccccgcccctgtcccctagccgccgctccgggctctgctcgccctcctacgttgcggtcacacccttctcccttcggggagacaacgacggcggtggcgggagcttctccacggccgaccagctggagatggtgaccgagctgctgggaggagacatggtgaaccagagtttcatctgcgacccggacgacgagaccttcatcaaaaacatcatcatccaggactgtatgtggagcggcttctcggccgccgccaagctcgtctcagagaagctggcctcctaccaggctgcgcgcaaagacagcggcagcccgaaccccgcccgcggccacagcgtctgctccacctccagcttgtacctgcaggatctgagcgccgccgcctcagagtgcatcgacccctcggtggtcttcccctaccctctcaacgacagcagctcgcccaagtcctgcgcctcgcaagactccagcgccttctctccgtcctcggattctctgctctcctcgacggagtcctccccgcagggcagccccgagcccctggtgctccatgaggagacaccgcccaccaccagcagcgactctggagtgatttctatttcctttcttaaagaggaggaacaagaagatgaggaagaaatcgatgttgtttctgtggaaaagaggcaggctcctggcaaaaggtcagagtctggatcaccttctgctggaggccacagcaaacctcctcacagcccactggtcctcaagaggtgccacgtctccacacatcagcacaactacgcagcgcctccctccactcggaaggactatcctgctgccaagagggtcaagttggacagtgtcagagtcctgagacagatcagcaacaaccgaaaatgcaccagccccaggtcctcggacaccgaggagaatgtcaagaggcgaacacacaacgtcttggagcgccagaggaggaacgagctaaaacggagcttttttgccctgcgtgaccagatcccggagttggaaaacaatgaaaaggcccccaaggtagttatccttaaaaaagccacagcatacatcctgtccgtccaagcagaggagcaaaagctcatttctgaagaggacttgttgcggaaacgacgagaacagttgaaacacaaacttgaacagctacggaactcttgtgcgtaaggaaaagtaaggaaaacgattccttctaacagaaatgtcctgagcaatcacctatgaacttgtttcaaatgcatgatcaaatgcaacctcacaaccttggctgagtcttgagactgaaagatttagccataatgtaaactgcctcaaattggactttgggcataaaagaacttttttatgcttaccatcttttttttttctttaacagatttgtatttaagaattgtttttaaaaaattttaagatttacacaatgtttctctgtaaatattgccattaaatgtaaataactttaataaaacgtttatagcagttacacagaatttcaatcctagtatatagtacctagtattataggtactataaaccctaattttttttatttaagtacattttgctttttaaagttgatttttttctattgtttttagaaaaaataaaataactggcaaatatatcattgagccaaatcttaa

SEQ ID NO: 1164 - DNA, 3746 bp, Homo sapiens
ggagtttattcataacgcgctctccaagtatacgtggcaatgcgttgctgggttattttaatcattctaggcatcgttttcctccttatgcctctatcattcctccctatctacactaacatcccacgctctgaacgcgcgcccattaatacccttctttcctccactctccctgggactcttgatcaaagcgcggccctttccccagccttagcgaggcgccctgcagcctggtacgcgcgtggcgtggcggtgggcgcgcagtgcgttctcggtgtggagggcagctgttccgcctgcgatgatttatactcacaggacaaggatgcggtttgtcaaacagtactgctacggaggagcagcagagaaagggagagggtttgagagggagcaaaagaaaatgcagcgggcgggcactttgcactggaacttacaacacccgagcaaggacgcgactctcccgacgcggggaggctattctgcccatttggggacacttccccgccgctgccaggacccgcttctctgaaaggctctccttgcagctgcttagacgctggatttttttcgggtagtggaaaaccagcagcctcccgcgacgatgcccctcaacgttagcttcaccaacaggaactatgacctcgactacgactcggtgcagccgtatttctactgcgacgaggaggagaacttctaccagcagcagcagcagagcgagctgcagcccccggcgcccagcgaggatatctggaagaaattcgagctgctgcccaccccgcccctgtcccctagccgccgctccgggctctgctcgccctcctacgttgcggtcacacccttctcccttcggggagacaacgacggcggtggcgggagcttctccacggccgaccagctggagatggtgaccgagctgctgggaggagacatggtgaaccagagtttcatctgcgacccggacgacgagaccttcatcaaaaacatcatcatccaggactgtatgtggagcggcttctcggccgccgccaagctcgtctcagagaagctggcctcctaccaggctgcgcgcaaagacagcggcagcccgaaccccgcccgcggccacagcgtctgctccacctccagcttgtacctgcaggatctgagcgccgccgcctcagagtgcatcgacccctcggtggtcttcccctaccctctcaacgacagcagctcgcccaagtcctgcgcctcgcaagactccagcgccttctctccgtcctcggattctctgctctcctcgacggagtcctccccgcagggcagccccgagcccctggtgctccatgaggagacaccgcccaccaccagcagcgactctggtaagcgaagcccgcccaggcctgtcaaaagtgggcggctggatacctttcccattttcattggcagcttatttaacgggccactcttattaggaaggagagatagcagatctggagagatttgggagctcatcacctctgaaaccttgggctttagcgtttcctcccatcccttccccttagactgcccatgtttgcagcccccctccccgtttgtctcccacccctcaggaatttcatttaggtttttaaaccttctggcttatcttacaactcaatccacttcttcttacctcccgttaacattttaattgccctggggcggggtggcagggagtgtatgaatgaggataagagaggattgatctctgagagtgaatgaattgcttccctcttaacttccgagaagtggtgggatttaatgaactatctacaaaaatgaggggctgtgtttagaggctaggcagggcctgcctgagtgcgggagccagtgaactgcctcaagagtgggtgggctgaggagctgggatcttctcagcctattttgaacactgaaaagcaaatccttgccaaagttggacttttttttttcttttattccttcccccgccctcttggacttttggcaaaactgcaatttttttttttttatttttcatttccagtaaaatagggagttgctaaagtcataccaagcaatttgcagctatcatttgcaacacctgaagtgttcttggtaaagtccctcaaaaataggaggtgcttgggaatgtgctttgctttgggtgtgtccaaagcctcattaagtcttaggtaagaattggcatcaatgtcctatcctgggaagttgcacttttcttgtccatgccataacccagctgtctttccctttatgagactcttaccttcatggtgagaggagtaagggtggctggctagattggttcttttttttttttttcccttttttaagacggagtctcactctgtcactaggctggagtgcagtggcgcaatcaacctccaaccccctggttcaagagattctcctgcctcagcctcccaagtagctgggactacaggtgcacaccaccatgccaggctaatttttgtaattttagtagagatggggtttcatcgtgttggccaggatggtctctcctgacctcacgatccgcccacctcggcctcccaaagtgctgggattacaggtgtgagccagggcaccaggcttagatgtggctctttggggagataattttgtccagagacctttctaacgtattcatgccttgtatttgtacagcattaatctggtaattgattattttaatgtaaccttgctaaagaggaggaacaagaagatgaggaagaaatcgatgttgtttctgtggaaaagaggcaggctcctggcaaaaggtcagagtctggatcaccttctgctggaggccacagcaaacctcctcacagcccactggtcctcaagaggtgccacgtctccacacatcagcacaactacgcagcgcctccctccactcggaaggactatcctgctgccaagagggtcaagttggacagtgtcagagtcctgagacagatcagcaacaaccgaaaatgcaccagccccaggtcctcggacaccgaggagaatgtcaagaggcgaacacacaacgtcttggagcgccagaggaggaacgagctaaaacggagcttttttgccctgcgtgaccagatcccggagttggaaaacaatgaaaaggcccccaaggtagttatccttaaaaaagccacagcatacatcctgtccgtccaagcagaggagcaaaagctcatttctgaagaggacttgttgcggaaacgacgagaacagttgaaacacaaacttgaacagctacggaactcttgtgcgtaaggaaaagtaaggaaaacgattccttctaacagaaatgtcctgagcaatcacctatgaacttgtttcaaatgcatgatcaaatgcaacctcacaaccttggctgagtcttgagactgaaagatttagccataatgtaaactgcctcaaattggactttgggcataaaagaacttttttatgcttaccatcttttttttttctttaacagatttgtatttaagaattgtttttaaaaaattttaagatttacacaatgtttctctgtaaatattgccattaaatgtaaataactttaataaaacgtttatagcagttacacagaatttcaatcctagtatatagtacctagtattataggtactataaaccctaattttttttatttaagtacattttgctttttaaagttgatttttttctattgtttttagaaaaaataaaataactggcaaatatatcattgagccaaatcttaa

SEQ ID NO: 1165 - DNA, 2424 bp, Homo sapiens
ggagtttattcataacgcgctctccaagtatacgtggcaatgcgttgctgggttattttaatcattctaggcatcgttttcctccttatgcctctatcattcctccctatctacactaacatcccacgctctgaacgcgcgcccattaatacccttctttcctccactctccctgggactcttgatcaaagcgcggccctttccccagccttagcgaggcgccctgcagcctggtacgcgcgtggcgtggcggtgggcgcgcagtgcgttctcggtgtggagggcagctgttccgcctgcgatgatttatactcacaggacaaggatgcggtttgtcaaacagtactgctacggaggagcagcagagaaagggagagggtttgagagggagcaaaagaaaatgcagcgggcgggcactttgcactggaacttacaacacccgagcaaggacgcgactctcccgacgcggggaggctattctgcccatttggggacacttccccgccgctgccaggacccgcttctctgaaaggctctccttgcagctgcttagacgctggatttttttcgggtagtggaaaaccagcagcctcccgcgacgatgcccctcaacgttagcttcaccaacaggaactatgacctcgactacgactcggtgcagccgtatttctactgcgacgaggaggagaacttctaccagcagcagcagcagagcgagctgcagcccccggcgcccagcgaggatatctggaagaaattcgagctgctgcccaccccgcccctgtcccctagccgccgctccgggctctgctcgccctcctacgttgcggtcacacccttctcccttcggggagacaacgacggcggtggcgggagcttctccacggccgaccagctggagatggtgaccgagctgctgggaggagacatggtgaaccagagtttcatctgcgacccggacgacgagaccttcatcaaaaacatcatcatccaggactgtatgtggagcggcttctcggccgccgccaagctcgtctcagagaagctggcctcctaccaggctgcgcgcaaagacagcggcagcccgaaccccgcccgcggccacagcgtctgctccacctccagcttgtacctgcaggatctgagcgccgccgcctcagagtgcatcgacccctcggtggtcttcccctaccctctcaacgacagcagctcgcccaagtcctgcgcctcgcaagactccagcgccttctctccgtcctcggattctctgctctcctcgacggagtcctccccgcagggcagccccgagcccctggtgctccatgaggagacaccgcccaccaccagcagcgactctggagtgatttctatttcctttcttaaagaggaggaacaagaagatgaggaagaaatcgatgttgtttctgtggaaaagaggcaggctcctggcaaaaggtcagagtctggatcaccttctgctggaggccacagcaaacctcctcacagcccactggtcctcaagaggtgccacgtctccacacatcagcacaactacgcagcgcctccctccactcggaaggactatcctgctgccaagagggtcaagttggacagtgtcagagtcctgagacagatcagcaacaaccgaaaatgcaccagccccaggtcctcggacaccgaggagaatgtcaagaggcgaacacacaacgtcttggagcgccagaggaggaacgagctaaaacggagcttttttgccctgcgtgaccagatcccggagttggaaaacaatgaaaaggcccccaaggtagttatccttaaaaaagccacagcatacatcctgtccgtccaagcagaggagcaaaagctcatttctgaagaggacttgttgcggaaacgacgagaacagttgaaacacaaacttgaacagctacggaactcttgtgcgtaaggaaaagtaaggaaaacgattccttctaacagaaatgtcctgagcaatcacctatgaacttgtttcaaatgcatgatcaaatgcaacctcacaaccttggctgagtcttgagactgaaagatttagccataatgtaaactgcctcaaattggactttgggcataaaagaacttttttatgcttaccatcttttttttttctttaacagatttgtatttaagaattgtttttaaaaaattttaagatttacacaatgtttctctgtaaatattgccattaaatgtaaataactttaataaaacgtttatagcagttacacagaatttcaatcctagtatatagtacctagtattataggtactataaaccctaattttttttatttaagtacattttgctttttaaagttgatttttttctattgtttttagaaaaaataaaataactggcaaatatatcattgagccaaatcttaa

SEQ ID NO: 1166 - DNA, 330 bp, Artificial
  Synthetic oligonucleotide
ggagtttattcataacgcgctctccaagtatacgtggcaatgcgttgctgggttattttaatcattctaggcatcgttttcctccttatgcctctatcattcctccctatctacactaacatcccacgctctgaacgcgcgcccattaatacccttctttcctccactctccctgggactcttgatcaaagcgcggccctttccccagccttagcgaggcgccctgcagcctggtacgcgcgtggcgtggcggtgggcgcgcagtgcgttctcggtgtggagggcagctgttccgcctgcgatgatttatactcacaggacaaggatgcg

SEQ ID NO: 1167 - DNA, 352 bp, Artificial
  Synthetic oligonucleotide
gtaggcgcgcgtagttaattcatgcggctctcttactctgtttacatcctagagctagagtgctcggctgcccggctgagtctcctccccaccttccccaccctccccaccctccccataagcgcccctcccgggttcccaaagcagagggcgtgggggaaaagaaaaaagatcctctctcgctaatctccgcccaccggccctttataatgcgagggtctggacggctgaggacccccgagctgtgctgctcgcggccgccaccgccgggccccggccgtccctggctcccctcctgcctcgagaagggcagggcttctcagaggcttggcgggaaaaagaacggagggag

SEQ ID NO: 1168 - DNA, 146 bp, Artificial
  Synthetic oligonucleotide
agccgggcgagcagagctgcgctgcgggcgtcctgggaagggagatccggagcgaatagggggcttcgcctctggcccagccctcccgctgatcccccagccagcggtccgcaacccttgccgcatccacgaaactttgcccatag

SEQ ID NO: 1169 - DNA, 183 bp, Artificial
  Synthetic oligonucleotide
cagcgggcgggcactttgcactggaacttacaacacccgagcaaggacgcgactctcccgacgcggggaggctattctgcccatttggggacacttccccgccgctgccaggacccgcttctctgaaaggctctccttgcagctgcttagacgctggatttttttcgggtagtggaaaaccag

SEQ ID NO: 1170 - DNA, 330 bp, Artificial
  Synthetic oligonucleotide
gtaagcaccgaagtccacttgccttttaatttatttttttatcactttaatgctgagatgagtcgaatgcctaaatagggtgtcttttctcccattcctgcgctattgacacttttctcagagtagttatggtaactggggctggggtggggggtaatccagaactggatcggggtaaagtgacttgtcaagatgggagaggagaaggcagagggaaaacgggaatggtttttaagactaccctttcgagatttctgccttatgaatatattcacgctgactcccggccggtcggacattcctgctttattgtgttaattgctctctggg

SEQ ID NO: 1171 - DNA, 1294 bp, Artificial
  Synthetic oligonucleotide
ttttggggggctgggggttgctttgcggtgggcagaaagccccttgcatcctgagctccttggagtagggaccgcatatcgcctgtgtgagccagatcgctccgcagccgctgacttgtccccgtctccgggagggcatttaaatttcggctcaccgcatttctgacagccggagacggacactgcggcgcgtcccgcccgcctgtccccgcggcgattccaacccgccctgatccttttaagaagttggcatttggctttttaaaaagcaataatacaatttaaaacctgggtctctagaggtgttaggacgtggtgttgggtaggcgcaggcaggggaaaagggaggcgaggatgtgtccgattctcctggaatcgttgacttggaaaaaccagggcgaatctccgcacccagccctgactcccctgccgcggccgccctcgggtgtcctcgcgcccgagatgcggaggaactgcgaggagcggggctctgggcggttccagaacagctgctacccttggtggggtggctccgggggaggtatcgcagcggggtctctggcgcagttgcatctccgtattgagtgcgaagggaggtgcccctattattatttgacaccccccttgtatttatggaggggtgttaaagcccgcggctgagctcgccactccagccggcgagagaaagaagaaaagctggcaaaaggagtgttggacgggggcggtactgggggtggggacgggggcggtggagagggaaggttgggaggggctgcggtgccggcgggggtaggagagcggctagggcgcgagtgggaacagccgcagcggaggggccccggcgcggagcggggttcacgcagccgctagcgcccaggcgcctctcgccttctccttcaggtggcgcaaaactttgtgccttggattttgtcaaattgttttcctcaccgccacctcccgcggcttcttaagggcgccagggccgatttcgattcctctgccgctgcggggccgactcccgggctttgcgctccgggctcccgggggagcgggggctcggcgggcaccaagccgctggttcactaagtgcgtctccgagatagcaggggactgtccaaagggggtgaaagggtgctccctttattcccccaccaagaccacccagccgctttaggggatagctctgcaaggggagaggttcgggactgtggcgcgcactgcgcgctgcgccaggtttccgcaccaagacccctttaactcaagactgcctcccgctttgtgtgccccgctccag

SEQ ID NO: 1172 - DNA, 212 bp, Artificial
  Synthetic oligonucleotide
cagcctcccgcgacgatgcccctcaacgttagcttcaccaacaggaactatgacctcgactacgactcggtgcagccgtatttctactgcgacgaggaggagaacttctaccagcagcagcagcagagcgagctgcagcccccggcgcccagcgaggatatctggaagaaattcgagctgctgcccaccccgcccctgtcccctagccgccg

SEQ ID NO: 1173 - DNA, 482 bp, Artificial
  Synthetic oligonucleotide
cttctccacggccgaccagctggagatggtgaccgagctgctgggaggagacatggtgaaccagagtttcatctgcgacccggacgacgagaccttcatcaaaaacatcatcatccaggactgtatgtggagcggcttctcggccgccgccaagctcgtctcagagaagctggcctcctaccaggctgcgcgcaaagacagcggcagcccgaaccccgcccgcggccacagcgtctgctccacctccagcttgtacctgcaggatctgagcgccgccgcctcagagtgcatcgacccctcggtggtcttcccctaccctctcaacgacagcagctcgcccaagtcctgcgcctcgcaagactccagcgccttctctccgtcctcggattctctgctctcctcgacggagtcctccccgcagggcagccccgagcccctggtgctccatgaggagacaccgcccaccaccagcagcgactctg

SEQ ID NO: 1174 - DNA, 1349 bp, Artificial
  Synthetic oligonucleotide
gtaagcgaagcccgcccaggcctgtcaaaagtgggcggctggatacctttcccattttcattggcagcttatttaacgggccactcttattaggaaggagagatagcagatctggagagatttgggagctcatcacctctgaaaccttgggctttagcgtttcctcccatcccttccccttagactgcccatgtttgcagcccccctccccgtttgtctcccacccctcaggaatttcatttaggtttttaaaccttctggcttatcttacaactcaatccacttcttcttacctcccgttaacattttaattgccctggggcggggtggcagggagtgtatgaatgaggataagagaggattgatctctgagagtgaatgaattgcttccctcttaacttccgagaagtggtgggatttaatgaactatctacaaaaatgaggggctgtgtttagaggctaggcagggcctgcctgagtgcgggagccagtgaactgcctcaagagtgggtgggctgaggagctgggatcttctcagcctattttgaacactgaaaagcaaatccttgccaaagttggacttttttttttcttttattccttcccccgccctcttggacttttggcaaaactgcaatttttttttttttatttttcatttccagtaaaatagggagttgctaaagtcataccaagcaatttgcagctatcatttgcaacacctgaagtgttcttggtaaagtccctcaaaaataggaggtgcttgggaatgtgctttgctttgggtgtgtccaaagcctcattaagtcttaggtaagaattggcatcaatgtcctatcctgggaagttgcacttttcttgtccatgccataacccagctgtctttccctttatgagactcttaccttcatggtgagaggagtaagggtggctggctagattggttcttttttttttttttcccttttttaagacggagtctcactctgtcactaggctggagtgcagtggcgcaatcaacctccaaccccctggttcaagagattctcctgcctcagcctcccaagtagctgggactacaggtgcacaccaccatgccaggctaatttttgtaattttagtagagatggggtttcatcgtgttggccaggatggtctctcctgacctcacgatccgcccacctcggcctcccaaagtgctgggattacaggtgtgagccagggcaccaggcttagatgtggctctttggggagataattttgtccagagacctttctaacgtattcatgccttgtatttgtacagcattaatctggtaattgattattttaatgtaaccttgctaaag

SEQ ID NO: 1175 - DNA, 1039 bp, Artificial
  Synthetic oligonucleotide
aggaggaacaagaagatgaggaagaaatcgatgttgtttctgtggaaaagaggcaggctcctggcaaaaggtcagagtctggatcaccttctgctggaggccacagcaaacctcctcacagcccactggtcctcaagaggtgccacgtctccacacatcagcacaactacgcagcgcctccctccactcggaaggactatcctgctgccaagagggtcaagttggacagtgtcagagtcctgagacagatcagcaacaaccgaaaatgcaccagccccaggtcctcggacaccgaggagaatgtcaagaggcgaacacacaacgtcttggagcgccagaggaggaacgagctaaaacggagcttttttgccctgcgtgaccagatcccggagttggaaaacaatgaaaaggcccccaaggtagttatccttaaaaaagccacagcatacatcctgtccgtccaagcagaggagcaaaagctcatttctgaagaggacttgttgcggaaacgacgagaacagttgaaacacaaacttgaacagctacggaactcttgtgcgtaaggaaaagtaaggaaaacgattccttctaacagaaatgtcctgagcaatcacctatgaacttgtttcaaatgcatgatcaaatgcaacctcacaaccttggctgagtcttgagactgaaagatttagccataatgtaaactgcctcaaattggactttgggcataaaagaacttttttatgcttaccatcttttttttttctttaacagatttgtatttaagaattgtttttaaaaaattttaagatttacacaatgtttctctgtaaatattgccattaaatgtaaataactttaataaaacgtttatagcagttacacagaatttcaatcctagtatatagtacctagtattataggtactataaaccctaattttttttatttaagtacattttgctttttaaagttgatttttttctattgtttttagaaaaaataaaataactggcaaatatatcattgagccaaatcttaa

SEQ ID NO: 1176 - DNA, 48 bp, Artificial
  Synthetic oligonucleotide
gtttgtcaaacagtactgctacggaggagcagcagagaaagggagagg

SEQ ID NO: 1177 - DNA, 25 bp, Artificial
  Synthetic oligonucleotide
gtttgagagggagcaaaagaaaatg

SEQ ID NO: 1178 - DNA, 8 bp, Artificial
  Synthetic oligonucleotide
ggatcgcg

SEQ ID NO: 1179 - DNA, 86 bp, Artificial
  Synthetic oligonucleotide
ctgagtataaaagccggttttcggggctttatctaactcgctgtagtaattccagcgagaggcagagggagcgagcgggcggccgg

SEQ ID NO: 1180 - DNA, 12 bp, Artificial
  Synthetic oligonucleotide
ctagggtggaag

SEQ ID NO: 1181 - DNA, 78 bp, Artificial
  Synthetic oligonucleotide
ctccgggctctgctcgccctcctacgttgcggtcacacccttctcccttcggggagacaacgacggcggtggcgggag

SEQ ID NO: 1182 - DNA, 27 bp, Artificial
  Synthetic oligonucleotide
gagtgatttctatttcctttcttaaag

SEQ ID NO: 1183 - protein, 439 aa, Homo sapiens
MPLNVSFTNRNYDLDYDSVQPYFYCDEEENFYQQQQQSELQPPAPSEDIWKKFELLPTPPLSPSRRSGLCSPSYVAVTPFSLRGDNDGGGGSFSTADQLEMVTELLGGDMVNQSFICDPDDETFIKNIIIQDCMWSGFSAAAKLVSEKLASYQAARKDSGSPNPARGHSVCSTSSLYLQDLSAAASECIDPSVVFPYPLNDSSSPKSCASQDSSAFSPSSDSLLSSTESSPQGSPEPLVLHEETPPTTSSDSEEEQEDEEEIDVVSVEKRQAPGKRSESGSPSAGGHSKPPHSPLVLKRCHVSTHQHNYAAPPSTRKDYPAAKRVKLDSVRVLRQISNNRKCTSPRSSDTEENVKRRTHNVLERQRRNELKRSFFALRDQIPELENNEKAPKVVILKKATAYILSVQAEEQKLISEEDLLRKRREQLKHKLEQLRNSCA

SEQ ID NO: 1184 - protein, 355 aa, Homo sapiens [sequence omitted]

SEQ ID NO: 1185 - protein, 448 aa, Homo sapiens
MPLNVSFTNRNYDLDYDSVQPYFYCDEEENFYQQQQQSELQPPAPSEDIWKKFELLPTPPLSPSRRSGLCSPSYVAVTPFSLRGDNDGGGGSFSTADQLEMVTELLGGDMVNQSFICDPDDETFIKNIIIQDCMWSGFSAAAKLVSEKLASYQAARKDSGSPNPARGHSVCSTSSLYLQDLSAAASECIDPSVVFPYPLNDSSSPKSCASQDSSAFSPSSDSLLSSTESSPQGSPEPLVLHEETPPTTSSDSGVISISFLKEEEQEDEEEIDVVSVEKRQAPGKRSESGSPSAGGHSKPPHSPLVLKRCHVSTHQHNYAAPPSTRKDYPAAKRVKLDSVRVLRQISNNRKCTSPRSSDTEENVKRRTHNVLERQRRNELKRSFFALRDQIPELENNEKAPKVVILKKATAYILSVQAEEQKLISEEDLLRKRREQLKHKLEQLRNSCA

SEQ ID NO: 1186 - protein, 114 aa, Homo sapiens
MRCWVILIILGIVFLLMPLSFLPIYTNIPRSERAPINTLLSSTLPGTLDQSAALSPALARRPAAWYARGVAVGAQCVLGVEGSCSACDDLYSQDKDAVCQTVLLRRSSRERERV

SEQ ID NO: 1187 - DNA, 2038 bp, Homo sapiens
tctagaggatccgccaagaggtagaagaaacagtatccacagtggactccggggctcctacagacttggcacagcttcctacagtcttgaaacagccctgttgttctgtcatggccagtgggcagtttgtgaacaaactgcaagaggaagtgatctgccccatctgcctggacattctgcagaaacctgtcaccatcgactgtgggcacaatttctgcctcaaatgcatcactcagattggggaaacatcatgtggatttttcaaatgtcccctctgcaaaacttccgtaaggaagaacgcaatcaggttcaactcgctgttgcggaatctggtggagaaaatccaagctctacaagcctctgaggtgcagtccaaaaggaaagaggctacatgcccgaggcaccaggagatgttccactatttctgcgaggatgatgggaagttcctctgttttgtgtgtcgtgaatccaaggaccacaaatcccataatgtcagcttgatcgaagaagctgcccagaattatcaggggcagattcaagagcagatccaagtcttgcagcaaaaggagaaggagacagtacaagtgaaggcacaaggtgtacacagggtcgatgtcttcacggaccaggtagaacatgagaagcaaaggatcctcacagaatttgaactcctgcatcaagtcctagaggaggagaagaatttcctgctatcacggatttactggctgggtcatgagggaacggaagcggggaaacactatgttgcctccactgagccacagttgaacgatctcaagaagctcgttgattccctgaagaccaagcagaacatgccacccaggcagctgctggaggatatcaaagtcgtcttgtgcagaagtgaagagtttcagtttctcaacccaacccctgttcctctggaactggagaaaaaactcagtgaagcaaaatcaagacacgactccatcacagggagcctgaaaaaattcaaagaccaactccaggctgataggaaaaaagatgaaaacagattcttcaaaagcatgaataaaaatgacatgaagagctggggcttgttacagaaaaataatcataaaatgaacaaaacctcagagcccgggtcatcttctgcaggcggcagaactacatcggggccaccaaatcaccactcttcagccccatcccactccctgtttcgggcctcgtctgctgggaaagtcacttttccagtatgtctcctggcctcttatgatgagatttctggtcaaggagcgagctctcaggatacgaagacatttgacgttgcgctgtccgaggagctccatgcggcactgagtgagtggctgacagcgatccgggcttggttttgtgaggttccttcaagctaagccagctcagagaacacggggagcggtggtgctacacggacttcggagcatagagtggcgctgagtgagtggctgagaccgaccacggttcttgacttagtggaattgggtcgaaggagtggagaatgggagggctcgggctactgagagtggagatgggggcgggggtggtggtgaagagagttggagaaggaatggacgagttcttgagcaaaaggaggggaagagacaatctccagccacccgccccacgcttgacttcttatcactttggctgtggtgccgcctagtggaaaaaggaagtccctgcagcagtccccgcactctttaagcagctgtttaccgaaggcaccagttcagccaggagtgaaatccggagaggagcaacgccagcctgggtcacagtccatcaaaccccatgagcccgaccactctcgctcttccttacattcccacgtcccccttctctcccaacccctcatatcagcaagggaaattaattaatgagatttgataaatcagtagatagaatgaggtccccattctgaaatatttagcagactggaaccaccacgcaagcctctgtagggggtggatggagacacttctaactttaataaactgcgactgaacgtggaatcctagaaaaa

SEQ ID NO: 1188 - DNA, 2066 bp, Homo sapiens
ctaattggcagaatctctgacctccactttctctgactcccttctcccttcctagaaacagtatccacagtggactccggggctcctacagacttggcacagcttcctacagtcttgaaacagccctgttgttctgtcatggccagtgggcagtttgtgaacaaactgcaagaggaagtgatctgccccatctgcctggacattctgcagaaacctgtcaccatcgactgtgggcacaatttctgcctcaaatgcatcactcagattggggaaacatcatgtggatttttcaaatgtcccctctgcaaaacttccgtaaggaagaacgcaatcaggttcaactcgctgttgcggaatctggtggagaaaatccaagctctacaagcctctgaggtgcagtccaaaaggaaagaggctacatgcccgaggcaccaggagatgttccactatttctgcgaggatgatgggaagttcctctgttttgtgtgtcgtgaatccaaggaccacaaatcccataatgtcagcttgatcgaagaagctgcccagaattatcaggggcagattcaagagcagatccaagtcttgcagcaaaaggagaaggagacagtacaagtgaaggcacaaggtgtacacagggtcgatgtcttcacggaccaggtagaacatgagaagcaaaggatcctcacagaatttgaactcctgcatcaagtcctagaggaggagaagaatttcctgctatcacggatttactggctgggtcatgagggaacggaagcggggaaacactatgttgcctccactgagccacagttgaacgatctcaagaagctcgttgattccctgaagaccaagcagaacatgccacccaggcagctgctggaggatatcaaagtcgtcttgtgcagaagtgaagagtttcagtttctcaacccaacccctgttcctctggaactggagaaaaaactcagtgaagcaaaatcaagacacgactccatcacagggagcctgaaaaaattcaaagaccaactccaggctgataggaaaaaagatgaaaacagattcttcaaaagcatgaataaaaatgacatgaagagctggggcttgttacagaaaaataatcataaaatgaacaaaacctcagagcccgggtcatcttctgcaggcggcagaactacatcggggccaccaaatcaccactcttcagccccatcccactccctgtttcgggcctcgtctgctgggaaagtcacttttccagtatgtctcctggcctcttatgatgagatttctggtcaaggagcgagctctcaggatacgaagacatttgacgttgcgctgtccgaggagctccatgcggcactgagtgagtggctgacagcgatccgggcttggttttgtgaggttccttcaagctaagccagctcagagaacacggggagcggtggtgctacacggacttcggagcatagagtggcgctgagtgagtggctgagaccgaccacggttcttgacttagtggaattgggtcgaaggagtggagaatgggagggctcgggctactgagagtggagatgggggcgggggtggtggtgaagagagttggagaaggaatggacgagttcttgagcaaaaggaggggaagagacaatctccagccacccgccccacgcttgacttcttatcactttggctgtggtgccgcctagtggaaaaaggaagtccctgcagcagtccccgcactctttaagcagctgtttaccgaaggcaccagttcagccaggagtgaaatccggagaggagcaacgccagcctgggtcacagtccatcaaaccccatgagcccgaccactctcgctcttccttacattcccacgtcccccttctctcccaacccctcatatcagcaagggaaattaattaatgagatttgataaatcagtagatagaatgaggtccccattctgaaatatttagcagactggaaccaccacgcaagcctctgtagggggtggatggagacacttctaactttaataaactgcgactgaacgtggaatcctagaaaaa

SEQ ID NO: 1189 - DNA, 2039 bp, Homo sapiens
tatccatttgttctcaagaggtagcaagaaacagtatccacagtggactccggggctcctacagacttggcacagcttcctacagtcttgaaacagccctgttgttctgtcatggccagtgggcagtttgtgaacaaactgcaagaggaagtgatctgccccatctgcctggacattctgcagaaacctgtcaccatcgactgtgggcacaatttctgcctcaaatgcatcactcagattggggaaacatcatgtggatttttcaaatgtcccctctgcaaaacttccgtaaggaagaacgcaatcaggttcaactcgctgttgcggaatctggtggagaaaatccaagctctacaagcctctgaggtgcagtccaaaaggaaagaggctacatgcccgaggcaccaggagatgttccactatttctgcgaggatgatgggaagttcctctgttttgtgtgtcgtgaatccaaggaccacaaatcccataatgtcagcttgatcgaagaagctgcccagaattatcaggggcagattcaagagcagatccaagtcttgcagcaaaaggagaaggagacagtacaagtgaaggcacaaggtgtacacagggtcgatgtcttcacggaccaggtagaacatgagaagcaaaggatcctcacagaatttgaactcctgcatcaagtcctagaggaggagaagaatttcctgctatcacggatttactggctgggtcatgagggaacggaagcggggaaacactatgttgcctccactgagccacagttgaacgatctcaagaagctcgttgattccctgaagaccaagcagaacatgccacccaggcagctgctggaggatatcaaagtcgtcttgtgcagaagtgaagagtttcagtttctcaacccaacccctgttcctctggaactggagaaaaaactcagtgaagcaaaatcaagacacgactccatcacagggagcctgaaaaaattcaaagaccaactccaggctgataggaaaaaagatgaaaacagattcttcaaaagcatgaataaaaatgacatgaagagctggggcttgttacagaaaaataatcataaaatgaacaaaacctcagagcccgggtcatcttctgcaggcggcagaactacatcggggccaccaaatcaccactcttcagccccatcccactccctgtttcgggcctcgtctgctgggaaagtcacttttccagtatgtctcctggcctcttatgatgagatttctggtcaaggagcgagctctcaggatacgaagacatttgacgttgcgctgtccgaggagctccatgcggcactgagtgagtggctgacagcgatccgggcttggttttgtgaggttccttcaagctaagccagctcagagaacacggggagcggtggtgctacacggacttcggagcatagagtggcgctgagtgagtggctgagaccgaccacggttcttgacttagtggaattgggtcgaaggagtggagaatgggagggctcgggctactgagagtggagatgggggcgggggtggtggtgaagagagttggagaaggaatggacgagttcttgagcaaaaggaggggaagagacaatctccagccacccgccccacgcttgacttcttatcactttggctgtggtgccgcctagtggaaaaaggaagtccctgcagcagtccccgcactctttaagcagctgtttaccgaaggcaccagttcagccaggagtgaaatccggagaggagcaacgccagcctgggtcacagtccatcaaaccccatgagcccgaccactctcgctcttccttacattcccacgtcccccttctctcccaacccctcatatcagcaagggaaattaattaatgagatttgataaatcagtagatagaatgaggtccccattctgaaatatttagcagactggaaccaccacgcaagcctctgtagggggtggatggagacacttctaactttaataaactgcgactgaacgtggaatcctagaaaaa

SEQ ID NO: 1190 - DNA, 1840 bp, Homo sapiens
ctaattggcagaatctctgacctccactttctctgactcccttctcccttcctagaaacagtatccacagtggactccggggctcctacagacttggcacagcttcctacagtcttgaaacagccctgttgttctgtcatggccagtgggcagtttgtgaacaaactgcaagaggaagtgatctgccccatctgcctggacattctgcagaaacctgtcaccatcgactgtgggcacaatttctgcctcaaatgcatcactcagattggggaaacatcatgtggatttttcaaatgtcccctctgcaaaacttccgtaaggaagaacgcaatcaggttcaactcgctgttgcggaatctggtggagaaaatccaagctctacaagcctctgaggtgcagtccaaaaggaaagaggctacatgcccgaggcaccaggagatgttccactatttctgcgaggatgatgggaagttcctctgttttgtgtgtcgtgaatccaaggaccacaaatcccataatgtcagcttgatcgaagaagctgcccagaattatcaggggcagattcaagagcagatccaagtcttgcagcaaaaggagaaggagacagtacaagtgaaggcacaaggtgtacacagggtcgatgtcttcacggaccaggtagaacatgagaagcaaaggatcctcacagaatttgaactcctgcatcaagtcctagaggaggagaagaatttcctgctatcacggatttactggctgggtcatgagggaacggaagcggggaaacactatgttgcctccactgagccacagttgaacgatctcaagaagctcgttgattccctgaagaccaagcagaacatgccacccaggcagctgctggaggatatcaaagtcgtcttgtgcagaagtgaagagtttcagtttctcaacccaacccctgttcctctggaactggagaaaaaactcagtgaagcaaaatcaagacacgactccatcacagggagcctgaaaaaattcaaagaccaactccaggctgataggaaaaaagatgaaaacagattcttcaaaagcatgaataaaaatgacatgaagagctggggcttgttacagaaaaataatcataaaatgaacaaaacctcagagcccgggtcatcttctgcaggcggcagaactacatcggggccaccaaatcaccactcttcagccccatcccactccctgtttcgggcctcgtctgctgggaaagtcacttttccagtatgtctcctggcctcttatgatgagatttctggtcaaggagcgagctctcaggatacgaagacatttgacgttgcgctgtccgaggagctccatgcggcactgagtgagtggctgacagcgatccgggcttggttttgtgaggttccttcaagctaagccagctcagagaacacggggagcggtggtgctacacggacttcggagcatagagtggcgctgatggaaaaaggaagtccctgcagcagtccccgcactctttaagcagctgtttaccgaaggcaccagttcagccaggagtgaaatccggagaggagcaacgccagcctgggtcacagtccatcaaaccccatgagcccgaccactctcgctcttccttacattcccacgtcccccttctctcccaacccctcatatcagcaagggaaattaattaatgagatttgataaatcagtagatagaatgaggtccccattctgaaatatttagcagactggaaccaccacgcaagcctctgtagggggtggatggagacacttctaactttaataaactgcgactgaacgtggaatcctagaaaaa

SEQ ID NO: 1191 - DNA, 1930 bp, Homo sapiens
ctaattggcagaatctctgacctccactttctctgactcccttctcccttcctagaaacagtatccacagtggactccggggctcctacagacttggcacagcttcctacagtcttgaaacagccctgttgttctgtcatggccagtgggcagtttgtgaacaaactgcaagaggaagtgatctgccccatctgcctggacattctgcagaaacctgtcaccatcgactgtgggcacaatttctgcctcaaatgcatcactcagattggggaaacatcatgtggatttttcaaatgtcccctctgcaaaacttccgtaaggaagaacgcaatcagttcctctgttttgtgtgtcgtgaatccaaggaccacaaatcccataatgtcagcttgatcgaagaagctgcccagaattatcaggggcagattcaagagcagatccaagtcttgcagcaaaaggagaaggagacagtacaagtgaaggcacaaggtgtacacagggtcgatgtcttcacggaccaggtagaacatgagaagcaaaggatcctcacagaatttgaactcctgcatcaagtcctagaggaggagaagaatttcctgctatcacggatttactggctgggtcatgagggaacggaagcggggaaacactatgttgcctccactgagccacagttgaacgatctcaagaagctcgttgattccctgaagaccaagcagaacatgccacccaggcagctgctggaggatatcaaagtcgtcttgtgcagaagtgaagagtttcagtttctcaacccaacccctgttcctctggaactggagaaaaaactcagtgaagcaaaatcaagacacgactccatcacagggagcctgaaaaaattcaaagaccaactccaggctgataggaaaaaagatgaaaacagattcttcaaaagcatgaataaaaatgacatgaagagctggggcttgttacagaaaaataatcataaaatgaacaaaacctcagagcccgggtcatcttctgcaggcggcagaactacatcggggccaccaaatcaccactcttcagccccatcccactccctgtttcgggcctcgtctgctgggaaagtcacttttccagtatgtctcctggcctcttatgatgagatttctggtcaaggagcgagctctcaggatacgaagacatttgacgttgcgctgtccgaggagctccatgcggcactgagtgagtggctgacagcgatccgggcttggttttgtgaggttccttcaagctaagccagctcagagaacacggggagcggtggtgctacacggacttcggagcatagagtggcgctgagtgagtggctgagaccgaccacggttcttgacttagtggaattgggtcgaaggagtggagaatgggagggctcgggctactgagagtggagatgggggcgggggtggtggtgaagagagttggagaaggaatggacgagttcttgagcaaaaggaggggaagagacaatctccagccacccgccccacgcttgacttcttatcactttggctgtggtgccgcctagtggaaaaaggaagtccctgcagcagtccccgcactctttaagcagctgtttaccgaaggcaccagttcagccaggagtgaaatccggagaggagcaacgccagcctgggtcacagtccatcaaaccccatgagcccgaccactctcgctcttccttacattcccacgtcccccttctctcccaacccctcatatcagcaagggaaattaattaatgagatttgataaatcagtagatagaatgaggtccccattctgaaatatttagcagactggaaccaccacgcaagcctctgtagggggtggatggagacacttctaactttaataaactgcgactgaacgtggaatcctagaaaaa

SEQ ID NO: 1192 - DNA, 2919 bp, Homo sapiens
ctaattggcagaatctctgacctccactttctctgactcccttctcccttcctagaaacagtatccacagtggactccggggctcctacagacttggcacagcttcctacagtcttgaaacagccctgttgttctgtcatggccagtgggcagtttgtgaacaaactgcaagaggaagtgatctgccccatctgcctggacattctgcagaaacctgtcaccatcgactgtgggcacaatttctgcctcaaatgcatcactcagattggggaaacatcatgtggatttttcaaatgtcccctctgcaaaacttccgtaaggaagaacgcaatcaggttcaactcgctgttgcggaatctggtggagaaaatccaagctctacaagcctctgaggtgcagtccaaaaggaaagaggctacatgcccgaggcaccaggagatgttccactatttctgcgaggatgatgggaagttcctctgttttgtgtgtcgtgaatccaaggaccacaaatcccataatgtcagcttgatcgaagaagctgcccagaattatcaggggcagattcaagagcagatccaagtcttgcagcaaaaggagaaggagacagtacaagtgaaggcacaaggtgtacacagggtcgatgtcttcacggaccaggtagaacatgagaagcaaaggatcctcacagaatttgaactcctgcatcaagtcctagaggaggagaagaatttcctgctatcacggatttactggctgggtcatgagggaacggaagcggggaaacactatgttgcctccactgagccacagttgaacgatctcaagaagctcgttgattccctgaagaccaagcagaacatgccacccaggcagctgctggaggatatcaaagtcgtcttgtgcaggtatgatgggccaccccaaatgtattttgcctactgattcatccacatacaattctcagcgtatatccaaatgcagtcaacattcctctctcagaaatacccacccacctctaactctgcattcatacatttaggctgcagctggggaatgcctatgccaaccatattagcacgtggttggttgttaaagaaaccagctgttttctcagccttcctccttcttcagcacagattctactatttcctgaatgcccccttgctcaactgaatagctcctgggtcccctactctgtctccctgaccctgtttttttccctcctctctgtctccatctcccatcttcatttccatatctccctatgccctacctcactcctgccccatatccctagccctgactttctgactcccagctcactatcccttaaccgccaggtcttcttctttttttttttttttttggagatggagctttgctcttgttgctcaggctggagtgcagtggtgcaatctcagctcactgcaacctttgtctcccaggttcaagtgattctcctgcctcagcctcccaagtagctgagactacaggcgcttgccaccaagcctggctaattttcatatttttagtagagaccgggttttaccatgttggccaggctagtcttgaactcctgacctcaggtgatccacccgcctcagcctcccaaagtgctgggattacaggtgtgagccaccgctctcagttctacccccaggtcttcatcccctcatttctcaaccccatatctcagatcctccttctcccacacctcatcccctgatctcaccaaccagctcaaccacatcttcctagaagtgaagagtttcagtttctcaacccaacccctgttcctctggaactggagaaaaaactcagtgaagcaaaatcaagacacgactccatcacagggagcctgaaaaaattcaaagaccaactccaggctgataggaaaaaagatgaaaacagattcttcaaaagcatgaataaaaatgacatgaagagctggggcttgttacagaaaaataatcataaaatgaacaaaacctcagagcccgggtcatcttctgcaggcggcagaactacatcggggccaccaaatcaccactcttcagccccatcccactccctgtttcgggcctcgtctgctgggaaagtcacttttccagtatgtctcctggcctcttatgatgagatttctggtcaaggagcgagctctcaggatacgaagacatttgacgttgcgctgtccgaggagctccatgcggcactgagtgagtggctgacagcgatccgggcttggttttgtgaggttccttcaagctaagccagctcagagaacacggggagcggtggtgctacacggacttcggagcatagagtggcgctgagtgagtggctgagaccgaccacggttcttgacttagtggaattgggtcgaaggagtggagaatgggagggctcgggctactgagagtggagatgggggcgggggtggtggtgaagagagttggagaaggaatggacgagttcttgagcaaaaggaggggaagagacaatctccagccacccgccccacgcttgacttcttatcactttggctgtggtgccgcctagtggaaaaaggaagtccctgcagcagtccccgcactctttaagcagctgtttaccgaaggcaccagttcagccaggagtgaaatccggagaggagcaacgccagcctgggtcacagtccatcaaaccccatgagcccgaccactctcgctcttccttacattcccacgtcccccttctctcccaacccctcatatcagcaagggaaattaattaatgagatttgataaatcagtagatagaatgaggtccccattctgaaatatttagcagactggaaccaccacgcaagcctctgtagggggtggatggagacacttctaactttaataaactgcgactgaacgtggaatcctagaaaaa

SEQ ID NO: 1193 - DNA, 1620 bp, Homo sapiens
gagaatggaaaggatgtgaaaatttgactcagaaggtttgggctcaagcccagtcttgtgagtttactgtacaacctgcaaggaatcactttacctctctgagcctcaggggcagattcaagagcagatccaagtcttgcagcaaaaggagaaggagacagtacaagtgaaggcacaaggtgtacacagggtcgatgtcttcacggaccaggtagaacatgagaagcaaaggatcctcacagaatttgaactcctgcatcaagtcctagaggaggagaagaatttcctgctatcacggatttactggctgggtcatgagggaacggaagcggggaaacactatgttgcctccactgagccacagttgaacgatctcaagaagctcgttgattccctgaagaccaagcagaacatgccacccaggcagctgctggaggatatcaaagtcgtcttgtgcagaagtgaagagtttcagtttctcaacccaacccctgttcctctggaactggagaaaaaactcagtgaagcaaaatcaagacacgactccatcacagggagcctgaaaaaattcaaagaccaactccaggctgataggaaaaaagatgaaaacagattcttcaaaagcatgaataaaaatgacatgaagagctggggcttgttacagaaaaataatcataaaatgaacaaaacctcagagcccgggtcatcttctgcaggcggcagaactacatcggggccaccaaatcaccactcttcagccccatcccactccctgtttcgggcctcgtctgctgggaaagtcacttttccagtatgtctcctggcctcttatgatgagatttctggtcaaggagcgagctctcaggatacgaagacatttgacgttgcgctgtccgaggagctccatgcggcactgagtgagtggctgacagcgatccgggcttggttttgtgaggttccttcaagctaagccagctcagagaacacggggagcggtggtgctacacggacttcggagcatagagtggcgctgagtgagtggctgagaccgaccacggttcttgacttagtggaattgggtcgaaggagtggagaatgggagggctcgggctactgagagtggagatgggggcgggggtggtggtgaagagagttggagaaggaatggacgagttcttgagcaaaaggaggggaagagacaatctccagccacccgccccacgcttgacttcttatcactttggctgtggtgccgcctagtggaaaaaggaagtccctgcagcagtccccgcactctttaagcagctgtttaccgaaggcaccagttcagccaggagtgaaatccggagaggagcaacgccagcctgggtcacagtccatcaaaccccatgagcccgaccactctcgctcttccttacattcccacgtcccccttctctcccaacccctcatatcagcaagggaaattaattaatgagatttgataaatcagtagatagaatgaggtccccattctgaaatatttagcagactggaaccaccacgcaagcctctgtagggggtggatggagacacttctaactttaataaactgcgactgaacgtggaatcctagaaaaa

SEQ ID NO: 1194 - DNA, 1950 bp, Homo sapiens
ctaattggcagaatctctgacctccactttctctgactcccttctcccttcctagaaacagtatccacagtggactccggggctcctacagacttggcacagcttcctacagtcttgaaacagccctgttgttctgtcatggccagtgggcagtttgtgaacaaactgcaagaggaagtgatctgccccatctgcctggacattctgcagaaacctgtcaccatcgactgtgggcacaatttctgcctcaaatgcatcactcagattggggaaacatcatgtggatttttcaaatgtcccctctgcaaaacttccgtaaggaagaacgcaatcaggttcaactcgctgttgcggaatctggtggagaaaatccaagctctacaagcctctgaggtgcagtccaaaaggaaagaggctacatgcccgaggcaccaggagatgttccactatttctgcgaggatgatgggaagttcctctgttttgtgtgtcgtgaatccaaggaccacaaatcccataatgtcagcttgatcgaagaagctgcccagaattatcaggggcagattcaagagcagatccaagtcttgcagcaaaaggagaaggagacagtacaagtgaaggcacaaggtgtacacagggtcgatgtcttcacggaccaggtagaacatgagaagcaaaggatcctcacagaatttgaactcctgcatcaagtcctagaggaggagaagaatttcctgctatcacggatttactggctgggtcatgagggaacggaagcggggaaacactatgttgcctccactgagccacagttgaacgatctcaagaagctcgttgattccctgaagaccaagcagaacatgccacccaggcagctgctggaggatatcaaagtcgtcttgtgcagaccaactccaggctgataggaaaaaagatgaaaacagattcttcaaaagcatgaataaaaatgacatgaagagctggggcttgttacagaaaaataatcataaaatgaacaaaacctcagagcccgggtcatcttctgcaggcggcagaactacatcggggccaccaaatcaccactcttcagccccatcccactccctgtttcgggcctcgtctgctgggaaagtcacttttccagtatgtctcctggcctcttatgatgagatttctggtcaaggagcgagctctcaggatacgaagacatttgacgttgcgctgtccgaggagctccatgcggcactgagtgagtggctgacagcgatccgggcttggttttgtgaggttccttcaagctaagccagctcagagaacacggggagcggtggtgctacacggacttcggagcatagagtggcgctgagtgagtggctgagaccgaccacggttcttgacttagtggaattgggtcgaaggagtggagaatgggagggctcgggctactgagagtggagatgggggcgggggtggtggtgaagagagttggagaaggaatggacgagttcttgagcaaaaggaggggaagagacaatctccagccacccgccccacgcttgacttcttatcactttggctgtggtgccgcctagtggaaaaaggaagtccctgcagcagtccccgcactctttaagcagctgtttaccgaaggcaccagttcagccaggagtgaaatccggagaggagcaacgccagcctgggtcacagtccatcaaaccccatgagcccgaccactctcgctcttccttacattcccacgtcccccttctctcccaacccctcatatcagcaagggaaattaattaatgagatttgataaatcagtagatagaatgaggtccccattctgaaatatttagcagactggaaccaccacgcaagcctctgtagggggtggatggagacacttctaactttaataaactgcgactgaacgtggaatcctagaaaaa

SEQ ID NO: 1195 - DNA, 2128 bp, Homo sapiens
ctaattggcagaatctctgacctccactttctctgactcccttctcccttcctagaaacagtatccacagtggactccggggctcctacagacttggcacagcttcctacagtcttgaaacagccctgttgttctgtcatggccagtgggcagtttgtgaacaaactgcaagaggaagtgatctgccccatctgcctggacattctgcagaaacctgtcaccatcgactgtgggcacaatttctgcctcaaatgcatcactcagattggggaaacatcatgtggatttttcaaatgtcccctctgcaaaacttccgtaaggaagaacgcaatcaggttcaactcgctgttgcggaatctggtggagaaaatccaagctctacaagcctctgaggtgcagtccaaaaggaaagaggctacatgcccgaggcaccaggagatgttccactatttctgcgaggatgatgggaagttcctctgttttgtgtgtcgtgaatccaaggaccacaaatcccataatgtcagcttgatcgaagaagctgcccagaattatcaggggcagattcaagagcagatccaagtcttgcagcaaaaggagaaggagacagtacaagtgaaggcacaaggtgtacacagggtcgatgtcttcacggaccaggtagaacatgagaagcaaaggatcctcacagaatttgaactcctgcatcaagtcctagaggaggagaagaatttcctgctatcacggatttactggctgggtcatgagggaacggaagcggggaaacactatgttgcctccactgagccacagttgaacgatctcaagaagctcgttgattccctgaagaccaagcagaacatgccacccaggcagctgctggaggatatcaaagtcgtcttgtgcagatcctccttctcccacacctcatcccctgatctcaccaaccagctcaaccacatcttcctagaagtgaagagtttcagtttctcaacccaacccctgttcctctggaactggagaaaaaactcagtgaagcaaaatcaagacacgactccatcacagggagcctgaaaaaattcaaagaccaactccaggctgataggaaaaaagatgaaaacagattcttcaaaagcatgaataaaaatgacatgaagagctggggcttgttacagaaaaataatcataaaatgaacaaaacctcagagcccgggtcatcttctgcaggcggcagaactacatcggggccaccaaatcaccactcttcagccccatcccactccctgtttcgggcctcgtctgctgggaaagtcacttttccagtatgtctcctggcctcttatgatgagatttctggtcaaggagcgagctctcaggatacgaagacatttgacgttgcgctgtccgaggagctccatgcggcactgagtgagtggctgacagcgatccgggcttggttttgtgaggttccttcaagctaagccagctcagagaacacggggagcggtggtgctacacggacttcggagcatagagtggcgctgagtgagtggctgagaccgaccacggttcttgacttagtggaattgggtcgaaggagtggagaatgggagggctcgggctactgagagtggagatgggggcgggggtggtggtgaagagagttggagaaggaatggacgagttcttgagcaaaaggaggggaagagacaatctccagccacccgccccacgcttgacttcttatcactttggctgtggtgccgcctagtggaaaaaggaagtccctgcagcagtccccgcactctttaagcagctgtttaccgaaggcaccagttcagccaggagtgaaatccggagaggagcaacgccagcctgggtcacagtccatcaaaccccatgagcccgaccactctcgctcttccttacattcccacgtcccccttctctcccaacccctcatatcagcaagggaaattaattaatgagatttgataaatcagtagatagaatgaggtccccattctgaaatatttagcagactggaaccaccacgcaagcctctgtagggggtggatggagacacttctaactttaataaactgcgactgaacgtggaatcctagaaaaa

SEQ ID NO: 1196 - DNA, 2378 bp, Homo sapiens
ctaattggcagaatctctgacctccactttctctgactcccttctcccttcctagaaacagtatccacagtggactccggggctcctacagacttggcacagcttcctacagtcttgaaacagccctgttgttctgtcatggccagtgggcagtttgtgaacaaactgcaagaggaagtgatctgccccatctgcctggacattctgcagaaacctgtcaccatcgactgtgggcacaatttctgcctcaaatgcatcactcagattggggaaacatcatgtggatttttcaaatgtcccctctgcaaaacttccgtaaggaagaacgcaatcaggttcaactcgctgttgcggaatctggtggagaaaatccaagctctacaagcctctgaggtgcagtccaaaaggaaagaggctacatgcccgaggcaccaggagatgttccactatttctgcgaggatgatgggaagttcctctgttttgtgtgtcgtgaatccaaggaccacaaatcccataatgtcagcttgatcgaagaagctgcccagaattatcaggggcagattcaagagcagatccaagtcttgcagcaaaaggagaaggagacagtacaagtgaaggcacaaggtgtacacagggtcgatgtcttcacggaccaggtagaacatgagaagcaaaggatcctcacagaatttgaactcctgcatcaagtcctagaggaggagaagaatttcctgctatcacggatttactggctgggtcatgagggaacggaagcggggaaacactatgttgcctccactgagccacagttgaacgatctcaagaagctcgttgattccctgaagaccaagcagaacatgccacccaggcagctgctggaggatatcaaagtcgtcttgtgcagaagtgaagagtttcagtttctcaacccaacccctgttcctctggaactggagaaaaaactcagtgaagcaaaatcaagacacgactccatcacagggagcctgaaaaaattcaaagaccaactccaggctgataggaaaaaagatgaaaacagattcttcaaaagcatgaataaaaatgacatgaagagctggggcttgttacagaaaaataatcataaaatgaacaaaacctcagagcccgggtcatcttctgcaggtaagagtcctgtctctgaatactaagggacctctaagtctacaggtggtcaaaatgctgtatccacccaattccactaaatggaataaatgaataaatgaatgaattcatttattccatttcctcagttcctccccaaattacacctctgccaggaaacagagggcgctccgacttgttcaggtgtactttcttgagtttcacctccatccctcctgctgtatgtagagctcagctgtgctgtctggcaatggaggattgctgccgaggtgctcccgctgacctcttttctcctttccttctcccgcaaaggcggcagaactacatcggggccaccaaatcaccactcttcagccccatcccactccctgtttcgggcctcgtctgctgggaaagtcacttttccagtatgtctcctggcctcttatgatgagatttctggtcaaggagcgagctctcaggatacgaagacatttgacgttgcgctgtccgaggagctccatgcggcactgagtgagtggctgacagcgatccgggcttggttttgtgaggttccttcaagctaagccagctcagagaacacggggagcggtggtgctacacggacttcggagcatagagtggcgctgagtgagtggctgagaccgaccacggttcttgacttagtggaattgggtcgaaggagtggagaatgggagggctcgggctactgagagtggagatgggggcgggggtggtggtgaagagagttggagaaggaatggacgagttcttgagcaaaaggaggggaagagacaatctccagccacccgccccacgcttgacttcttatcactttggctgtggtgccgcctagtggaaaaaggaagtccctgcagcagtccccgcactctttaagcagctgtttaccgaaggcaccagttcagccaggagtgaaatccggagaggagcaacgccagcctgggtcacagtccatcaaaccccatgagcccgaccactctcgctcttccttacattcccacgtcccccttctctcccaacccctcatatcagcaagggaaattaattaatgagatttgataaatcagtagatagaatgaggtccccattctgaaatatttagcagactggaaccaccacgcaagcctctgtagggggtggatggagacacttctaactttaataaactgcgactgaacgtggaatcctagaaaaa

SEQ ID NO: 1197 - DNA, 2022 bp, Homo sapiens
ctaattggcagaatctctgacctccactttctctgactcccttctcccttcctagaaacagtatccacagtggactccggggctcctacagacttggcacagcttcctacagtcttgaaacagccctgttgttctgtcatggccagtgggcagtttgtgaacaaactgcaagaggaagtgatctgccccatctgcctggacattctgcagaaacctgtcaccatcgactgtgggcacaatttctgcctcaaatgcatcactcagattggggaaacatcatgtggatttttcaaatgtcccctctgcaaaacttccgtaaggaagaacgcaatcaggttcaactcgctgttgcggaatctggtggagaaaatccaagctctacaagcctctgaggtgcagtccaaaaggaaagaggctacatgcccgaggcaccaggagatgttccactatttctgcgaggatgatgggaagttcctctgttttgtgtgtcgtgaatccaaggaccacaaatcccataatgtcagcttgatcgaagaagctgcccagaattatcaggggcagattcaagagcagatccaagtcttgcagcaaaaggagaaggagacagtacaagtgaaggcacaaggtgtacacagggtcgatgtcttcacggaccaggtagaacatgagaagcaaaggatcctcacagaatttgaactcctgcatcaagtcctagaggaggagaagaatttcctgctatcacggatttactggctgggtcatgagggaacggaagcggggaaacactatgttgcctccactgagccacagttgaacgatctcaagaagctcgttgattccctgaagaccaagcagaacatgccacccaggcagctgctggaggatatcaaagtcgtcttgtgcagaactggagaaaaaactcagtgaagcaaaatcaagacacgactccatcacagggagcctgaaaaaattcaaagaccaactccaggctgataggaaaaaagatgaaaacagattcttcaaaagcatgaataaaaatgacatgaagagctggggcttgttacagaaaaataatcataaaatgaacaaaacctcagagcccgggtcatcttctgcaggcggcagaactacatcggggccaccaaatcaccactcttcagccccatcccactccctgtttcgggcctcgtctgctgggaaagtcacttttccagtatgtctcctggcctcttatgatgagatttctggtcaaggagcgagctctcaggatacgaagacatttgacgttgcgctgtccgaggagctccatgcggcactgagtgagtggctgacagcgatccgggcttggttttgtgaggttccttcaagctaagccagctcagagaacacggggagcggtggtgctacacggacttcggagcatagagtggcgctgagtgagtggctgagaccgaccacggttcttgacttagtggaattgggtcgaaggagtggagaatgggagggctcgggctactgagagtggagatgggggcgggggtggtggtgaagagagttggagaaggaatggacgagttcttgagcaaaaggaggggaagagacaatctccagccacccgccccacgcttgacttcttatcactttggctgtggtgccgcctagtggaaaaaggaagtccctgcagcagtccccgcactctttaagcagctgtttaccgaaggcaccagttcagccaggagtgaaatccggagaggagcaacgccagcctgggtcacagtccatcaaaccccatgagcccgaccactctcgctcttccttacattcccacgtcccccttctctcccaacccctcatatcagcaagggaaattaattaatgagatttgataaatcagtagatagaatgaggtccccattctgaaatatttagcagactggaaccaccacgcaagcctctgtagggggtggatggagacacttctaactttaataaactgcgactgaacgtggaatcctagaaaaa

SEQ ID NO: 1198 - DNA, 1971 bp, Homo sapiens
tctagaggatccgccaagaggtagaagaaacagtatccacagtggactccggggctcctacagacttggcacagcttcctacagtcttgaaacagccctgttgttctgtcatggccagtgggcagtttgtgaacaaactgcaagaggaagtgatctgccccatctgcctggacattctgcagaaacctgtcaccatcgactgtgggcacaatttctgcctcaaatgcatcactcagattggggaaacatcatgtggatttttcaaatgtcccctctgcaaaacttccgtaaggaagaacgcaatcaggttcaactcgctgttgcggaatctggtggagaaaatccaagctctacaagcctctgaggtgcagtccaaaaggaaagaggctacatgcccgaggcaccaggagatgttccactatttctgcgaggatgatgggaagttcctctgttttgtgtgtcgtgaatccaaggaccacaaatcccataatgtcagcttgatcgaagaagctgcccagaattatcaggggcagattcaagagcagatccaagtcttgcagcaaaaggagaaggagacagtacaagtgaaggcacaaggtgtacacagggtcgatgtcttcacggaccaggtagaacatgagaagcaaaggatcctcacagaatttgaactcctgcatcaagtcctagaggaggagaagaatttcctgctatcacggatttactggctgggtcatgagggaacggaagcggggaaacactatgttgcctccactgagccacagttgaacgatctcaagaagctcgttgattccctgaagaccaagcagaacatgccacccaggcagctgctggagaactggagaaaaaactcagtgaagcaaaatcaagacacgactccatcacagggagcctgaaaaaattcaaagaccaactccaggctgataggaaaaaagatgaaaacagattcttcaaaagcatgaataaaaatgacatgaagagctggggcttgttacagaaaaataatcataaaatgaacaaaacctcagagcccgggtcatcttctgcaggcggcagaactacatcggggccaccaaatcaccactcttcagccccatcccactccctgtttcgggcctcgtctgctgggaaagtcacttttccagtatgtctcctggcctcttatgatgagatttctggtcaaggagcgagctctcaggatacgaagacatttgacgttgcgctgtccgaggagctccatgcggcactgagtgagtggctgacagcgatccgggcttggttttgtgaggttccttcaagctaagccagctcagagaacacggggagcggtggtgctacacggacttcggagcatagagtggcgctgagtgagtggctgagaccgaccacggttcttgacttagtggaattgggtcgaaggagtggagaatgggagggctcgggctactgagagtggagatgggggcgggggtggtggtgaagagagttggagaaggaatggacgagttcttgagcaaaaggaggggaagagacaatctccagccacccgccccacgcttgacttcttatcactttggctgtggtgccgcctagtggaaaaaggaagtccctgcagcagtccccgcactctttaagcagctgtttaccgaaggcaccagttcagccaggagtgaaatccggagaggagcaacgccagcctgggtcacagtccatcaaaccccatgagcccgaccactctcgctcttccttacattcccacgtcccccttctctcccaacccctcatatcagcaagggaaattaattaatgagatttgataaatcagtagatagaatgaggtccccattctgaaatatttagcagactggaaccaccacgcaagcctctgtagggggtggatggagacacttctaactttaataaactgcgactgaacgtggaatcctagaaaaa

SEQ ID NO: 1199 - DNA, 3231 bp, Homo sapiens
ctaattggcagaatctctgacctccactttctctgactcccttctcccttcctagaaacagtatccacagtggactccggggctcctacagacttggcacagcttcctacagtcttgaaacagccctgttgttctgtcatggccagtgggcagtttgtgaacaaactgcaagaggaagtgatctgccccatctgcctggacattctgcagaaacctgtcaccatcgactgtgggcacaatttctgcctcaaatgcatcactcagattggggaaacatcatgtggatttttcaaatgtcccctctgcaaaacttccgtaaggaagaacgcaatcaggttcaactcgctgttgcggaatctggtggagaaaatccaagctctacaagcctctgaggtgcagtccaaaaggaaagaggctacatgcccgaggcaccaggagatgttccactatttctgcgaggatgatgggaagttcctctgttttgtgtgtcgtgaatccaaggaccacaaatcccataatgtcagcttgatcgaagaagctgcccagaattatcaggggcagattcaagagcagatccaagtcttgcagcaaaaggagaaggagacagtacaagtgaaggcacaaggtgtacacagggtcgatgtcttcacggaccaggtagaacatgagaagcaaaggatcctcacagaatttgaactcctgcatcaagtcctagaggaggagaagaatttcctgctatcacggatttactggctgggtcatgagggaacggaagcggggaaacactatgttgcctccactgagccacagttgaacgatctcaagaagctcgttgattccctgaagaccaagcagaacatgccacccaggcagctgctggaggatatcaaagtcgtcttgtgcaggtatgatgggccaccccaaatgtattttgcctactgattcatccacatacaattctcagcgtatatccaaatgcagtcaacattcctctctcagaaatacccacccacctctaactctgcattcatacatttaggctgcagctggggaatgcctatgccaaccatattagcacgtggttggttgttaaagaaaccagctgttttctcagccttcctccttcttcagcacagattctactatttcctgaatgcccccttgctcaactgaatagctcctgggtcccctactctgtctccctgaccctgtttttttccctcctctctgtctccatctcccatcttcatttccatatctccctatgccctacctcactcctgccccatatccctagccctgactttctgactcccagctcactatcccttaaccgccaggtcttcttctttttttttttttttttggagatggagctttgctcttgttgctcaggctggagtgcagtggtgcaatctcagctcactgcaacctttgtctcccaggttcaagtgattctcctgcctcagcctcccaagtagctgagactacaggcgcttgccaccaagcctggctaattttcatatttttagtagagaccgggttttaccatgttggccaggctagtcttgaactcctgacctcaggtgatccacccgcctcagcctcccaaagtgctgggattacaggtgtgagccaccgctctcagttctacccccaggtcttcatcccctcatttctcaaccccatatctcagatcctccttctcccacacctcatcccctgatctcaccaaccagctcaaccacatcttcctagaagtgaagagtttcagtttctcaacccaacccctgttcctctggaactggagaaaaaactcagtgaagcaaaatcaagacacgactccatcacagggagcctgaaaaaattcaaagaccaactccaggctgataggaaaaaagatgaaaacagattcttcaaaagcatgaataaaaatgacatgaagagctggggcttgttacagaaaaataatcataaaatgaacaaaacctcagagcccgggtcatcttctgcaggtaagagtcctgtctctgaatactaagggacctctaagtctacaggtggtcaaaatgctgtatccacccaattccactaaatggaataaatgaataaatgaatgaattcatttattccatttcctcagttcctccccaaattacacctctgccaggaaacagagggcgctccgacttgttcaggtgtactttcttgagtttcacctccatccctcctgctgtatgtagagctcagctgtgctgtctggcaatggaggattgctgccgaggtgctcccgctgacctcttttctcctttccttctcccgcaaaggcggcagaactacatcggggccaccaaatcaccactcttcagccccatcccactccctgtttcgggcctcgtctgctgggaaagtcacttttccagtatgtctcctggcctcttatgatgagatttctggtcaaggagcgagctctcaggatacgaagacatttgacgttgcgctgtccgaggagctccatgcggcactgagtgagtggctgacagcgatccgggcttggttttgtgaggttccttcaagctaagccagctcagagaacacggggagcggtggtgctacacggacttcggagcatagagtggcgctgagtgagtggctgagaccgaccacggttcttgacttagtggaattgggtcgaaggagtggagaatgggagggctcgggctactgagagtggagatgggggcgggggtggtggtgaagagagttggagaaggaatggacgagttcttgagcaaaaggaggggaagagacaatctccagccacccgccccacgcttgacttcttatcactttggctgtggtgccgcctagtggaaaaaggaagtccctgcagcagtccccgcactctttaagcagctgtttaccgaaggcaccagttcagccaggagtgaaatccggagaggagcaacgccagcctgggtcacagtccatcaaaccccatgagcccgaccactctcgctcttccttacattcccacgtcccccttctctcccaacccctcatatcagcaagggaaattaattaatgagatttgataaatcagtagatagaatgaggtccccattctgaaatatttagcagactggaaccaccacgcaagcctctgtagggggtggatggagacacttctaactttaataaactgcgactgaacgtggaatcctagaaaaa

SEQ ID NO: 1200 - DNA, 2039 bp, Homo sapiens
tctagaggatccgccaagaggtagaagaaacagtatccacagtggactccggggctcctacagacttggcacagcttcctacagtcttgaaacagccctgttgttctgtcatggccagtgggcagtttgtgaacaaactgcaagaggaagtgatctgccccatctgcctggacattctgcagaaacctgtcaccatcgactgtgggcacaatttctgcctcaaatgcatcactcagattggggaaacatcatgtggatttttcaaatgtcccctctgcaaaacttccgtaaggaagaacgcaatcaggttcaactcgctgttgcggaatctggtggagaaaatccaagctctacaagcctctgaggtgcagtccaaaaggaaagaggctacatgcccgaggcaccaggagatgttccactatttctgcgaggatgatgggaagttcctctgttttgtgtgtcgtgaatccaaggaccacaaatcccataatgtcagcttgatcgaagaagctgcccagaattatcaggggcagattcaagagcagatccaagtcttgcagcaaaaggagaaggagacagtacaagtgaaggcacaaggtgtacacagggtcgatgtcttcacggaccaggtagaacatgagaagcaaaggatcctcacagaatttgaactcctgcatcaagtcctagaggaggagaagaatttcctgctatcacggatttactggctgggtcatgagggaacggaagcggggaaacactatgttgcctccactgagccacagttgaacgatctcaagaagctcgttgattccctgaagaccaagcagaacatgccacccaggcagctgctggaggtatacaaagtcgtcttgtggcagaagtgaagagtttcagtttctcaacccaacccctgttcctctggaactggagaaaaaactcagtgaagcaaaatcaagacacgactccatcacagggagcctgaaaaaattcaaagaccaactccaggctgataggaaaaaagatgaaaacagattcttcaaaagcatgaataaaaatgacatgaagagctggggcttgttacagaaaaataatcataaaatgaacaaaacctcagagcccgggtcatcttctgcaggcggcagaactacatcggggccaccaaatcaccactcttcagccccatcccactccctgtttcgggcctcgtctgctgggaaagtcacttttccagtatgtctcctggcctcttatgatgagatttctggtcaaggagcgagctctcaggatacgaagacatttgacgttgcgctgtccgaggagctccatgcggcactgagtgagtggctgacagcgatccgggcttggttttgtgaggttccttcaagctaagccagctcagagaacacggggagcggtggtgctacacggacttcggagcatagagtggcgctgagtgagtggctgagaccgaccacggttcttgacttagtggaattgggtcgaaggagtggagaatgggagggctcgggctactgagagtggagatgggggcgggggtggtggtgaagagagttggagaaggaatggacgagttcttgagcaaaaggaggggaagagacaatctccagccacccgccccacgcttgacttcttatcactttggctgtggtgccgcctagtggaaaaaggaagtccctgcagcagtccccgcactctttaagcagctgtttaccgaaggcaccagttcagccaggagtgaaatccggagaggagcaacgccagcctgggtcacagtccatcaaaccccatgagcccgaccactctcgctcttccttacattcccacgtcccccttctctcccaacccctcatatcagcaagggaaattaattaatgagatttgataaatcagtagatagaatgaggtccccattctgaaatatttagcagactggaaccaccacgcaagcctctgtagggggtggatggagacacttctaactttaataaactgcgactgaacgtggaatcctagaaaaa

SEQ ID NO: 1201 - DNA, 2789 bp, Homo sapiens
acttccgcctcctaggcccaagtcccaagtagctgggattacaggtccccaccaccacgcccagctaatttttgtattcttagcagacacggggttttaccatgttggccaggatggtctcgaactcctgacctcaagtgatctgcccacctcagcctcccaaagtgctgggattacaggcgtgaaccaccgtgcctggcctctatttttaatttaaatttgaattagtaaaaatgaaattaaaaattcagttctttgtcacactagccacaatttccaatgttcagtagccacatgtggttggtggctaccatattggacagtgcaagtctagctggtgcttaaaacaagctgagatgattcctcctcaagtcatctattctcccacaggttcaaaaacctatttatttattttaagaaagatcatgcaaagccattctagcctttctcctgccctggctagcagggctcccttgttcagtctcagagccaaattcatcttctaaatctcactcttctcttcttcactcagttcttcttgaggtcaaaacacttttctgcttactggcagagcagtgcttcttggagaagcccttcgtggtggggagaggggaggaggatggggtaagagagacttggaggggttcttactcctcctgctctgccccacacccagcaggctctgtatctcctccttggctcctgggaatcagccaagtgctgaggctgtgctgtttctctttctcttctaggatatcaaagtcgtcttgtgcaggtatgatgggccaccccaaatgtattttgcctactgattcatccacatacaattctcagcgtatatccaaatgcagtcaacattcctctctcagaaatacccacccacctctaactctgcattcatacatttaggctgcagctggggaatgcctatgccaaccatattagcacgtggttggttgttaaagaaaccagctgttttctcagccttcctccttcttcagcacagattctactatttcctgaatgcccccttgctcaactgaatagctcctgggtcccctactctgtctccctgaccctgtttttttccctcctctctgtctccatctcccatcttcatttccatatctccctatgccctacctcactcctgccccatatccctagccctgactttctgactcccagctcactatcccttaaccgccaggtcttcttctttttttttttttttttggagatggagctttgctcttgttgctcaggctggagtgcagtggtgcaatctcagctcactgcaacctttgtctcccaggttcaagtgattctcctgcctcagcctcccaagtagctgagactacaggcgcttgccaccaagcctggctaattttcatatttttagtagagaccgggttttaccatgttggccaggctagtcttgaactcctgacctcaggtgatccacccgcctcagcctcccaaagtgctgggattacaggtgtgagccaccgctctcagttctacccccaggtcttcatcccctcatttctcaaccccatatctcagatcctccttctcccacacctcatcccctgatctcaccaaccagctcaaccacatcttcctagaagtgaagagtttcagtttctcaacccaacccctgttcctctggaactggagaaaaaactcagtgaagcaaaatcaagacacgactccatcacagggagcctgaaaaaattcaaagaccaactccaggctgataggaaaaaagatgaaaacagattcttcaaaagcatgaataaaaatgacatgaagagctggggcttgttacagaaaaataatcataaaatgaacaaaacctcagagcccgggtcatcttctgcaggcggcagaactacatcggggccaccaaatcaccactcttcagccccatcccactccctgtttcgggcctcgtctgctgggaaagtcacttttccagtatgtctcctggcctcttatgatgagatttctggtcaaggagcgagctctcaggatacgaagacatttgacgttgcgctgtccgaggagctccatgcggcactgagtgagtggctgacagcgatccgggcttggttttgtgaggttccttcaagctaagccagctcagagaacacggggagcggtggtgctacacggacttcggagcatagagtggcgctgagtgagtggctgagaccgaccacggttcttgacttagtggaattgggtcgaaggagtggagaatgggagggctcgggctactgagagtggagatgggggcgggggtggtggtgaagagagttggagaaggaatggacgagttcttgagcaaaaggaggggaagagacaatctccagccacccgccccacgcttgacttcttatcactttggctgtggtgccgcctagtggaaaaaggaagtccctgcagcagtccccgcactctttaagcagctgtttaccgaaggcaccagttcagccaggagtgaaatccggagaggagcaacgccagcctgggtcacagtccatcaaaccccatgagcccgaccactctcgctcttccttacattcccacgtcccccttctctcccaacccctcatatcagcaagggaaattaattaatgagatttgataaatcagtagatagaatgaggtccccattctgaaatatttagcagactggaaccaccacgcaagcctctgtagggggtggatggagacacttctaactttaataaactgcgactgaacgtggaatcctagaaaaa

SEQ ID NO: 1202 - DNA, 1465 bp, Homo sapiens
agattgagtgtaaaaagagactgtaaaagatagcaataatttttataatacatgttgaaataacattttgagaatattgagttaaataaaatatataattaaagttaattttactagtttctttctactttttaaatgtgactactagaaaatttaaaaatatataagtggctcacattcatgactcagattacattcatcattcatactggacagtgctgggctaggcagtcaccacaggaaagcagaaagggcatctctcaagggttgcataccttcctggtccaataagaatatgagagtcaaatgcagcttctacttctcccaggcatttcaaattagtgccttgctgtgtgatagtgagttctttgctcaacccctctggactctcaccatttcatcccattctttattccccagaccaactccaggctgataggaaaaaagatgaaaacagattcttcaaaagcatgaataaaaatgacatgaagagctggggcttgttacagaaaaataatcataaaatgaacaaaacctcagagcccgggtcatcttctgcaggcggcagaactacatcggggccaccaaatcaccactcttcagccccatcccactccctgtttcgggcctcgtctgctgggaaagtcacttttccagtatgtctcctggcctcttatgatgagatttctggtcaaggagcgagctctcaggatacgaagacatttgacgttgcgctgtccgaggagctccatgcggcactgagtgagtggctgacagcgatccgggcttggttttgtgaggttccttcaagctaagccagctcagagaacacggggagcggtggtgctacacggacttcggagcatagagtggcgctgagtgagtggctgagaccgaccacggttcttgacttagtggaattgggtcgaaggagtggagaatgggagggctcgggctactgagagtggagatgggggcgggggtggtggtgaagagagttggagaaggaatggacgagttcttgagcaaaaggaggggaagagacaatctccagccacccgccccacgcttgacttcttatcactttggctgtggtgccgcctagtggaaaaaggaagtccctgcagcagtccccgcactctttaagcagctgtttaccgaaggcaccagttcagccaggagtgaaatccggagaggagcaacgccagcctgggtcacagtccatcaaaccccatgagcccgaccactctcgctcttccttacattcccacgtcccccttctctcccaacccctcatatcagcaagggaaattaattaatgagatttgataaatcagtagatagaatgaggtccccattctgaaatatttagcagactggaaccaccacgcaagcctctgtagggggtggatggagacacttctaactttaataaactgcgactgaacgtggaatcctagaaaaa

SEQ ID NO: 1203 - DNA, 1703 bp, Homo sapiens
ccaggtcatatgatcattaagtgaaagagagagaattagaactcctttctccaaagccagaaactacagaatgcattccaaagccagagagcaggatttagggatcctattccaccagcatttctccacaaaaggagctaccggtgtttagaaaggccatctttgttatgctccatgacttttgccctgttaaatgcttagtatcccaggccccagaaagccctataagccagtagagaaccacactcttgttgtcactgagacaacctgaaaggtttccacacttccccctgggtggggaatgggtcccactgagaaccattgactgttctgattgatgatggcagggtgcttgtttttgtttttaatttgcagcttctggttatcaagaccaaataggttttctctccccaatttttagggggcttgttacagaaaaataatcataaaatgaacaaaacctcagagcccgggtcatcttctgcaggtaagagtcctgtctctgaatactaagggacctctaagtctacaggtggtcaaaatgctgtatccacccaattccactaaatggaataaatgaataaatgaatgaattcatttattccatttcctcagttcctccccaaattacacctctgccaggaaacagagggcgctccgacttgttcaggtgtactttcttgagtttcacctccatccctcctgctgtatgtagagctcagctgtgctgtctggcaatggaggattgctgccgaggtgctcccgctgacctcttttctcctttccttctcccgcaaaggcggcagaactacatcggggccaccaaatcaccactcttcagccccatcccactccctgtttcgggcctcgtctgctgggaaagtcacttttccagtatgtctcctggcctcttatgatgagatttctggtcaaggagcgagctctcaggatacgaagacatttgacgttgcgctgtccgaggagctccatgcggcactgagtgagtggctgacagcgatccgggcttggttttgtgaggttccttcaagctaagccagctcagagaacacggggagcggtggtgctacacggacttcggagcatagagtggcgctgagtgagtggctgagaccgaccacggttcttgacttagtggaattgggtcgaaggagtggagaatgggagggctcgggctactgagagtggagatgggggcgggggtggtggtgaagagagttggagaaggaatggacgagttcttgagcaaaaggaggggaagagacaatctccagccacccgccccacgcttgacttcttatcactttggctgtggtgccgcctagtggaaaaaggaagtccctgcagcagtccccgcactctttaagcagctgtttaccgaaggcaccagttcagccaggagtgaaatccggagaggagcaacgccagcctgggtcacagtccatcaaaccccatgagcccgaccactctcgctcttccttacattcccacgtcccccttctctcccaacccctcatatcagcaagggaaattaattaatgagatttgataaatcagtagatagaatgaggtccccattctgaaatatttagcagactggaaccaccacgcaagcctctgtagggggtggatggagacacttctaactttaataaactgcgactgaacgtggaatcctagaaaaa

SEQ ID NO: 1204 - DNA, 1473 bp, Homo sapiens
ctaattggcagaatctctgacctccactttctctgactcccttctcccttcctagaaacagtatccacagtggactccggggctcctacagacttggcacagcttcctacagtcttgaaacagccctgttgttctgtcatggccagtgggcagtttgtgaacaaactgcaagaggaagtgatctgccccatctgcctggacattctgcagaaacctgtcaccatcgactgtgggcacaatttctgcctcaaatgcatcactcagattggggaaacatcatgtggatttttcaaatgtcccctctgcaaaacttccgtaaggaagaacgcaatcaggttcaactcgctgttgcggaatctggtggagaaaatccaagctctacaagcctctgaggtgcagtccaaaaggaaagaggctacatgcccgaggcaccaggagatgttccactatttctgcgaggatgatgggaagttcctctgttttgtgtgtcgtgaatccaaggaccacaaatcccataatgtcagcttgatcgaagaagctgcccagaattatcaggggcagattcaagagcagatccaagtcttgcagcaaaaggagaaggagacagtacaagtgaaggcacaaggtgtacacagggtcgatgtcttcacggaccaggtagaacatgagaagcaaaggatcctcacagaatttgaactcctgcatcaagtcctagaggaggagaagaatttcctgctatcacggatttactggctgggtcatgagggaacggaagcggggaaacactatgttgcctccactgagccacagttgaacgatctcaagaagctcgttgattccctgaagaccaagcagaacatgccacccaggcagctgctggaggatatcaaagtcgtcttgtgcagaagtgaagagtttcagtttctcaacccaacccctgttcctctggaactggagaaaaaactcagtgaagcaaaatcaagacacgactccatcacagggagcctgaaaaaattcaaagaccaactccaggctgataggaaaaaagatgaaaacagattcttcaaaagcatgaataaaaatgacatgaagagctgtaagtgagaaatgatggttggttgcttctgccatttggggaaagtgagaaaaggggaagaattgtgtctctatgattacatgaaggccagatataagtgaatgccgattcctcagccaattgagagaacaggcatatggttgttttattattttaaactcaggtaactcacaaaacagtcactaatcccaaactttgaagtattcagaagtaatagaaaattacaaatgtatttcttcactcctagagacagggaggaaaaagtgggacaagaaggaggcagctccacctctgtagtatttgctgcccctacagggcaccaggtttcgaggcaaactcctctgggtgtgaggtcagtacagctcaggggatggaga

SEQ ID NO: 1205 - DNA, 1777 bp, Homo sapiens
agattgagtgtaaaaagagactgtaaaagatagcaataatttttataatacatgttgaaataacattttgagaatattgagttaaataaaatatataattaaagttaattttactagtttctttctactttttaaatgtgactactagaaaatttaaaaatatataagtggctcacattcatgactcagattacattcatcattcatactggacagtgctgggctaggcagtcaccacaggaaagcagaaagggcatctctcaagggttgcataccttcctggtccaataagaatatgagagtcaaatgcagcttctacttctcccaggcatttcaaattagtgccttgctgtgtgatagtgagttctttgctcaacccctctggactctcaccatttcatcccattctttattccccagaccaactccaggctgataggaaaaaagatgaaaacagattcttcaaaagcatgaataaaaatgacatgaagagctggggcttgttacagaaaaataatcataaaatgaacaaaacctcagagcccgggtcatcttctgcaggtaagagtcctgtctctgaatactaagggacctctaagtctacaggtggtcaaaatgctgtatccacccaattccactaaatggaataaatgaataaatgaatgaattcatttattccatttcctcagttcctccccaaattacacctctgccaggaaacagagggcgctccgacttgttcaggtgtactttcttgagtttcacctccatccctcctgctgtatgtagagctcagctgtgctgtctggcaatggaggattgctgccgaggtgctcccgctgacctcttttctcctttccttctcccgcaaaggcggcagaactacatcggggccaccaaatcaccactcttcagccccatcccactccctgtttcgggcctcgtctgctgggaaagtcacttttccagtatgtctcctggcctcttatgatgagatttctggtcaaggagcgagctctcaggatacgaagacatttgacgttgcgctgtccgaggagctccatgcggcactgagtgagtggctgacagcgatccgggcttggttttgtgaggttccttcaagctaagccagctcagagaacacggggagcggtggtgctacacggacttcggagcatagagtggcgctgagtgagtggctgagaccgaccacggttcttgacttagtggaattgggtcgaaggagtggagaatgggagggctcgggctactgagagtggagatgggggcgggggtggtggtgaagagagttggagaaggaatggacgagttcttgagcaaaaggaggggaagagacaatctccagccacccgccccacgcttgacttcttatcactttggctgtggtgccgcctagtggaaaaaggaagtccctgcagcagtccccgcactctttaagcagctgtttaccgaaggcaccagttcagccaggagtgaaatccggagaggagcaacgccagcctgggtcacagtccatcaaaccccatgagcccgaccactctcgctcttccttacattcccacgtcccccttctctcccaacccctcatatcagcaagggaaattaattaatgagatttgataaatcagtagatagaatgaggtccccattctgaaatatttagcagactggaaccaccacgcaagcctctgtagggggtggatggagacacttctaactttaataaactgcgactgaacgtggaatcctagaaaaa

SEQ ID NO: 1206 - DNA, 1239 bp, Homo sapiens
agattgagtgtaaaaagagactgtaaaagatagcaataatttttataatacatgttgaaataacattttgagaatattgagttaaataaaatatataattaaagttaattttactagtttctttctactttttaaatgtgactactagaaaatttaaaaatatataagtggctcacattcatgactcagattacattcatcattcatactggacagtgctgggctaggcagtcaccacaggaaagcagaaagggcatctctcaagggttgcataccttcctggtccaataagaatatgagagtcaaatgcagcttctacttctcccaggcatttcaaattagtgccttgctgtgtgatagtgagttctttgctcaacccctctggactctcaccatttcatcccattctttattccccagaccaactccaggctgataggaaaaaagatgaaaacagattcttcaaaagcatgaataaaaatgacatgaagagctggggcttgttacagaaaaataatcataaaatgaacaaaacctcagagcccgggtcatcttctgcaggcggcagaactacatcggggccaccaaatcaccactcttcagccccatcccactccctgtttcgggcctcgtctgctgggaaagtcacttttccagtatgtctcctggcctcttatgatgagatttctggtcaaggagcgagctctcaggatacgaagacatttgacgttgcgctgtccgaggagctccatgcggcactgagtgagtggctgacagcgatccgggcttggttttgtgaggttccttcaagctaagccagctcagagaacacggggagcggtggtgctacacggacttcggagcatagagtggcgctgatggaaaaaggaagtccctgcagcagtccccgcactctttaagcagctgtttaccgaaggcaccagttcagccaggagtgaaatccggagaggagcaacgccagcctgggtcacagtccatcaaaccccatgagcccgaccactctcgctcttccttacattcccacgtcccccttctctcccaacccctcatatcagcaagggaaattaattaatgagatttgataaatcagtagatagaatgaggtccccattctgaaatatttagcagactggaaccaccacgcaagcctctgtagggggtggatggagacacttctaactttaataaactgcgactgaacgtggaatcctagaaaaa

SEQ ID NO: 1207 - DNA, 2264 bp, Homo sapiens
aacgttccccaaccaccgtccgagctgccccactcttcgcccggtcactgatgcagaggctgtcaggcctctctgcgcacgaaacccatcacagcacctgggccagcagccagtgccgggctgtcctcttcccaccccaaggcggtcctcttgagtcttcacaccgcctccttcggatccctccccatcctgaggacttcaggttgccggctcctcacttgggtcctgcgcacctcgggcttctcacagagtagccgtctccattctacggatagggaaacagaggaccagagccccgaaagtcgtacgccccaaagcccctgagagtggtctccaaatgctagtgctgtggctctggaaagattcattttatttcctgcaacaaaggcagcctcagagaactggcctccgagccttttccgtgcagacccccaatctttcaagacaccacagaccaattcagttggcaaaagccctaagaacagtacaccccaaaccaatggaataaaaaagttttgtttagttgagactgcagaactcttagctggcttacagatttctaaggcagcatttggcacctctgtttgctgtttggctcctctttcggcctctagagctgactgcagctccaatctccttgtcacatcctggtctgcaaactgagacctcacaggggcctttacaccgtagggcaactccttatgccgttgtcacactgaagctagaattctcaaagctggagcacttaggtgtctgcattttagaggtcccagcctgaatatatgcacaagcagggttttgtttctgagctcagtgaagaggactgctgtgactccagctcttctgaaatattagatgtgtaaaatgcaagattctcttccagccttgactggaggtgatgtggcaatgtgtgtacgcaagaaaagtccatgcagactttatacagactttactactacagacaagagaatctttctgaaagctaaggcccagagaagagcaaactactgaaaaactaaggcctgcatcagaagggcttctgcttccattaatggactgagtaattcagaccaagcctccatttgaagacaactaaaaatgctgggtaaaatatttttaagtatcttacttaaatattcaaaggttagtgaggaattgctgggccaaaatttgggaaaggaaaggaacatggaggtgagcctgcaactggggtcgcttctgttctgggagcatttgctgaagagagtttaagaatccaagctgcatttttggcagcctttaaaggcttaaagggagtagaaatggtgtcccagcccagagaatctcaagtaaccattgaacttgttcaaagtgactctaaactgctagtgtcaaaaacaatcattctgggaagaagataatagcatcctaggcctcaaatgcatctagcaaacaagcaaaaataatcaagccccagagaggcgagattgccataagaaaagcagaaacaggccaggtgcagtggctcatgcttgccataccagcactttgggaggctgaggctggggaattacttgagctcaagagttcaagaccagcctgcacaacatggtgaaactccgtttctacaaaaaatgcaaaagtcagttgggtgtggtggtgcacacctgtagtcccagctactagggtggctgaagtggatggacggcttgcgcttgggaagcagaggttgcaaagagctgagatcatgccactgtactccagcctgggccgtagagccagaccttgtctcaaaaagaaaagaaaagaaaaaaaaacaaaaataaaaacagacaacagaatcagacccatggggcttccagactctggggttattgggcatagactatataacaatgtatatgctatcttcaaaaggataaaagctatgtgtgaaacatttggcagagagctagaaattatagcaagtgacgtagcagattttttttggggaaaaggaaatctagattgagacagtgatgggcactagaattataaagtcatggaaactcaagtatggtggctgtgttggtcaatctgtgagcttagaaagaattaaacatgagcggctatgtgaccacagagagaaatggagagaatagcttcctatttttcagttgagttttttgctactacaaaattatataaccaaaaatagatgattttaactatgtaacttaaagggttatacatacacttggctcaaaaaataatatattaaaaggtatagattaagtaggactgtg

SEQ ID NO: 1208 - DNA, 2030 bp, Homo sapiens
aacgttccccaaccaccgtccgagctgccccactcttcgcccggtcactgatgcagaggctgtcaggcctctctgcgcacgaaacccatcacagcacctgggccagcagccagtgccgggctgtcctcttcccaccccaaggcggtcctcttgagtcttcacaccgcctccttcggatccctccccatcctgaggacttcaggttgccggctcctcacttgggtcctgcgcacctcgggcttctcacagagtagccgtctccattctacggatagggaaacagaggaccagagccccgaaagtcgtacgccccaaagcccctgagagtggtctccaaatgctagtgctgtggctctggaaagattcattttatttcctgcaacaaaggcagcctcagagaactggcctccgagccttttccgtgcagacccccaatctttcaagacaccacagaccaattcagttggcaaaagccctaagaacagtacaccccaaaccaatggaataaaaaagttttgtttagttgagactgcagaactcttagctggcttacagatttctaaggcagcatttggcacctctgtttgctgtttggctcctctttcggcctctagagctgactgcagctccaatctccttgtcacatcctggtctgcaaactgagacctcacaggggcctttacaccgtagggcaactccttatgccgttgtcacactgaagctagaattctcaaagctggagcacttaggtgtctgcattttagaggtcccagcctgaatatatgcacaagcagggttttgtttctgagctcagtgaagaggactgctgtgactccagctcttctgaaatattagatgtgtaaaatgcaagattctcttccagccttgactggaggtgatgtggcaatgtgtgtacgcaagaaaagtccatgcagactttatacagactttactactacagacaagagaatctttctgaaagctaaggcccagagaagagcaaactactgaaaaactaaggcctgcatcagaagggcttctgcttccattaatggactgagtaattcagaccaagcctccatttgaagacaactaaaaatgctgggtaaaatatttttaagtatcttacttaaatattcaaaggttagtgaggaattgctgggccaaaatttgggaaaggaaaggaacatggaggtgagcctgcaactggggtcgcttctgttctgggagcatttgctgaagagagtttaagaatccaagctgcatttttggcagcctttaaaggcttaaagggagtagaaatggtgtcccagcccagagaatctcaagtaaccattgaacttgttcaaagtgactctaaactgctagtgtcaaaaacaatcattctgggaagaagataatagcatcctaggcctcaaatgcatctagcaaacaagcaaaaataatcaagccccagagaggcgagattgccataagaaaagcagaaacaggccaggtgcagtggctcatgcttgccataccagcactttgggaggctgaggctggggaattacttgagctcaagagttcaagaccagcctgcacaacatggtgaaactccgtttctacaaaaaatgcaaaagtcagttgggtgtggtggtgcacacctgtagtcccagctactagggtggctgaagtggatggacggcttgcgcttgggaagcagaggttgcaaagagctgagatcatgccactgtactccagcctgggccgtagagccagaccttgtctcaaaaagaaaagaaaagaaaaaaaaacaaaaataaaaacagacaacagaatcagacccatggggcttccagactctggggttattgggcatagactatataacaatgtatatgctatcttcaaaaggataaaagctatgtgtgaaacatttggcagagagctagaaattatagcaagtgacgtagcagattttttttggggaaaaggaaatctagattgagacagtgatgggcactagaattataaagtcatggaaactc

SEQ ID NO: 1209 - DNA, 1081 bp, Homo sapiens
ctaattggcagaatctctgacctccactttctctgactcccttctcccttcctagaaacagtatccacagtggactccggggctcctacagacttggcacagcttcctacagtcttgaaacagccctgttgttctgtcatggccagtgggcagtttgtgaacaaactgcaagaggaagtgatctgccccatctgcctggacattctgcagaaacctgtcaccatcgactgtgggcacaatttctgcctcaaatgcatcactcagattggggaaacatcatgtggatttttcaaatgtcccctctgcaaaacttccgtaaggaagaacgcaatcaggttcaactcgctgttgcggaatctggtggagaaaatccaagctctacaagcctctgaggtgcagtccaaaaggaaagaggctacatgcccgaggcaccaggagatgttccactatttctgcgaggatgatgggaagttcctctgttttgtgtgtcgtgaatccaaggaccacaaatcccataatgtcagcttgatcgaagaagctgcccagaattatcaggggcagattcaagagcagatccaagtcttgcagcaaaaggagaaggagacagtacaagtgaaggcacaaggtgtacacagggtcgatgtcttcacggtaagaaaaactccatcccacgatctctggaagcagaaacatctctgccaaagctcctggaatcccctattacactgacccctcagaaaaagatccagtgagccatgtcctctcctctgcgcctcagcacctgaccggccaggcggcatcacctcccgcgtcggcctcgctattacagcgggctgactgctcagtctccaccggcagacaaggtggggcacggaaaacccgcgctggtcttagaatcgcaagtacaggtttttaaggccgagctgcgccctcaacggattccccagttagaaaatgaagacattggccgggcgcggtggctcacgccagtaatcacagcactctgggaggctgaggatcgcttgagcccaggagtttgagaccagcctgggcaacatagcgagactctcctcttaattaa

SEQ ID NO: 1210 - DNA, 872 bp, Homo sapiens
agattgagtgtaaaaagagactgtaaaagatagcaataatttttataatacatgttgaaataacattttgagaatattgagttaaataaaatatataattaaagttaattttactagtttctttctactttttaaatgtgactactagaaaatttaaaaatatataagtggctcacattcatgactcagattacattcatcattcatactggacagtgctgggctaggcagtcaccacaggaaagcagaaagggcatctctcaagggttgcataccttcctggtccaataagaatatgagagtcaaatgcagcttctacttctcccaggcatttcaaattagtgccttgctgtgtgatagtgagttctttgctcaacccctctggactctcaccatttcatcccattctttattccccagaccaactccaggctgataggaaaaaagatgaaaacagattcttcaaaagcatgaataaaaatgacatgaagagctgtaagtgagaaatgatggttggttgcttctgccatttggggaaagtgagaaaaggggaagaattgtgtctctatgattacatgaaggccagatataagtgaatgccgattcctcagccaattgagagaacaggcatatggttgttttattattttaaactcaggtaactcacaaaacagtcactaatcccaaactttgaagtattcagaagtaatagaaaattacaaatgtatttcttcactcctagagacagggaggaaaaagtgggacaagaaggaggcagctccacctctgtagtatttgctgcccctacagggcaccaggtttcgaggcaaactcctctgggtgtgaggtcagtacagctcaggggatggaga

SEQ ID NO: 1211 - DNA, 185 bp, Artificial
  Synthetic oligonucleotide
aacgttccccaaccaccgtccgagctgccccactcttcgcccggtcactgatgcagaggctgtcaggcctctctgcgcacgaaacccatcacagcacctgggccagcagccagtgccgggctgtcctcttcccaccccaaggcggtcctcttgagtcttcacaccgcctccttcggatccctccc

SEQ ID NO: 1212 - DNA, 2079 bp, Artificial
  Synthetic oligonucleotide
catcctgaggacttcaggttgccggctcctcacttgggtcctgcgcacctcgggcttctcacagagtagccgtctccattctacggatagggaaacagaggaccagagccccgaaagtcgtacgccccaaagcccctgagagtggtctccaaatgctagtgctgtggctctggaaagattcattttatttcctgcaacaaaggcagcctcagagaactggcctccgagccttttccgtgcagacccccaatctttcaagacaccacagaccaattcagttggcaaaagccctaagaacagtacaccccaaaccaatggaataaaaaagttttgtttagttgagactgcagaactcttagctggcttacagatttctaaggcagcatttggcacctctgtttgctgtttggctcctctttcggcctctagagctgactgcagctccaatctccttgtcacatcctggtctgcaaactgagacctcacaggggcctttacaccgtagggcaactccttatgccgttgtcacactgaagctagaattctcaaagctggagcacttaggtgtctgcattttagaggtcccagcctgaatatatgcacaagcagggttttgtttctgagctcagtgaagaggactgctgtgactccagctcttctgaaatattagatgtgtaaaatgcaagattctcttccagccttgactggaggtgatgtggcaatgtgtgtacgcaagaaaagtccatgcagactttatacagactttactactacagacaagagaatctttctgaaagctaaggcccagagaagagcaaactactgaaaaactaaggcctgcatcagaagggcttctgcttccattaatggactgagtaattcagaccaagcctccatttgaagacaactaaaaatgctgggtaaaatatttttaagtatcttacttaaatattcaaaggttagtgaggaattgctgggccaaaatttgggaaaggaaaggaacatggaggtgagcctgcaactggggtcgcttctgttctgggagcatttgctgaagagagtttaagaatccaagctgcatttttggcagcctttaaaggcttaaagggagtagaaatggtgtcccagcccagagaatctcaagtaaccattgaacttgttcaaagtgactctaaactgctagtgtcaaaaacaatcattctgggaagaagataatagcatcctaggcctcaaatgcatctagcaaacaagcaaaaataatcaagccccagagaggcgagattgccataagaaaagcagaaacaggccaggtgcagtggctcatgcttgccataccagcactttgggaggctgaggctggggaattacttgagctcaagagttcaagaccagcctgcacaacatggtgaaactccgtttctacaaaaaatgcaaaagtcagttgggtgtggtggtgcacacctgtagtcccagctactagggtggctgaagtggatggacggcttgcgcttgggaagcagaggttgcaaagagctgagatcatgccactgtactccagcctgggccgtagagccagaccttgtctcaaaaagaaaagaaaagaaaaaaaaacaaaaataaaaacagacaacagaatcagacccatggggcttccagactctggggttattgggcatagactatataacaatgtatatgctatcttcaaaaggataaaagctatgtgtgaaacatttggcagagagctagaaattatagcaagtgacgtagcagattttttttggggaaaaggaaatctagattgagacagtgatgggcactagaattataaagtcatggaaactcaagtatggtggctgtgttggtcaatctgtgagcttagaaagaattaaacatgagcggctatgtgaccacagagagaaatggagagaatagcttcctatttttcagttgagttttttgctactacaaaattatataaccaaaaatagatgattttaactatgtaacttaaagggttatacatacacttggctcaaaaaataatatattaaaaggtatagattaagtaggactgtg

SEQ ID NO: 1213 - DNA, 280 bp, Artificial
  Synthetic oligonucleotide
aaacagtatccacagtggactccggggctcctacagacttggcacagcttcctacagtcttgaaacagccctgttgttctgtcatggccagtgggcagtttgtgaacaaactgcaagaggaagtgatctgccccatctgcctggacattctgcagaaacctgtcaccatcgactgtgggcacaatttctgcctcaaatgcatcactcagattggggaaacatcatgtggatttttcaaatgtcccctctgcaaaacttccgtaaggaagaacgcaatcag

SEQ ID NO: 1214 - DNA, 136 bp, Artificial
  Synthetic oligonucleotide
gttcaactcgctgttgcggaatctggtggagaaaatccaagctctacaagcctctgaggtgcagtccaaaaggaaagaggctacatgcccgaggcaccaggagatgttccactatttctgcgaggatgatgggaag

SEQ ID NO: 1215 - DNA, 430 bp, Artificial
  Synthetic oligonucleotide
gtaagaaaaactccatcccacgatctctggaagcagaaacatctctgccaaagctcctggaatcccctattacactgacccctcagaaaaagatccagtgagccatgtcctctcctctgcgcctcagcacctgaccggccaggcggcatcacctcccgcgtcggcctcgctattacagcgggctgactgctcagtctccaccggcagacaaggtggggcacggaaaacccgcgctggtcttagaatcgcaagtacaggtttttaaggccgagctgcgccctcaacggattccccagttagaaaatgaagacattggccgggcgcggtggctcacgccagtaatcacagcactctgggaggctgaggatcgcttgagcccaggagtttgagaccagcctgggcaacatagcgagactctcctcttaattaa

SEQ ID NO: 1216 - DNA, 231 bp, Artificial
  Synthetic oligonucleotide
gaccaggtagaacatgagaagcaaaggatcctcacagaatttgaactcctgcatcaagtcctagaggaggagaagaatttcctgctatcacggatttactggctgggtcatgagggaacggaagcggggaaacactatgttgcctccactgagccacagttgaacgatctcaagaagctcgttgattccctgaagaccaagcagaacatgccacccaggcagctgctggag

SEQ ID NO: 1217 - DNA, 752 bp, Artificial
  Synthetic oligonucleotide
acttccgcctcctaggcccaagtcccaagtagctgggattacaggtccccaccaccacgcccagctaatttttgtattcttagcagacacggggttttaccatgttggccaggatggtctcgaactcctgacctcaagtgatctgcccacctcagcctcccaaagtgctgggattacaggcgtgaaccaccgtgcctggcctctatttttaatttaaatttgaattagtaaaaatgaaattaaaaattcagttctttgtcacactagccacaatttccaatgttcagtagccacatgtggttggtggctaccatattggacagtgcaagtctagctggtgcttaaaacaagctgagatgattcctcctcaagtcatctattctcccacaggttcaaaaacctatttatttattttaagaaagatcatgcaaagccattctagcctttctcctgccctggctagcagggctcccttgttcagtctcagagccaaattcatcttctaaatctcactcttctcttcttcactcagttcttcttgaggtcaaaacacttttctgcttactggcagagcagtgcttcttggagaagcccttcgtggtggggagaggggaggaggatggggtaagagagacttggaggggttcttactcctcctgctctgccccacacccagcaggctctgtatctcctccttggctcctgggaatcagccaagtgctgaggctgtgctgtttctctttctcttctag

SEQ ID NO: 1218 - DNA, 791 bp, Artificial
  Synthetic oligonucleotide
gtatgatgggccaccccaaatgtattttgcctactgattcatccacatacaattctcagcgtatatccaaatgcagtcaacattcctctctcagaaatacccacccacctctaactctgcattcatacatttaggctgcagctggggaatgcctatgccaaccatattagcacgtggttggttgttaaagaaaccagctgttttctcagccttcctccttcttcagcacagattctactatttcctgaatgcccccttgctcaactgaatagctcctgggtcccctactctgtctccctgaccctgtttttttccctcctctctgtctccatctcccatcttcatttccatatctccctatgccctacctcactcctgccccatatccctagccctgactttctgactcccagctcactatcccttaaccgccaggtcttcttctttttttttttttttttggagatggagctttgctcttgttgctcaggctggagtgcagtggtgcaatctcagctcactgcaacctttgtctcccaggttcaagtgattctcctgcctcagcctcccaagtagctgagactacaggcgcttgccaccaagcctggctaattttcatatttttagtagagaccgggttttaccatgttggccaggctagtcttgaactcctgacctcaggtgatccacccgcctcagcctcccaaagtgctgggattacaggtgtgagccaccgctctcagttctacccccaggtcttcatcccctcatttctcaaccccatatctcag

SEQ ID NO: 1219 - DNA, 420 bp, Artificial
  Synthetic oligonucleotide
agattgagtgtaaaaagagactgtaaaagatagcaataatttttataatacatgttgaaataacattttgagaatattgagttaaataaaatatataattaaagttaattttactagtttctttctactttttaaatgtgactactagaaaatttaaaaatatataagtggctcacattcatgactcagattacattcatcattcatactggacagtgctgggctaggcagtcaccacaggaaagcagaaagggcatctctcaagggttgcataccttcctggtccaataagaatatgagagtcaaatgcagcttctacttctcccaggcatttcaaattagtgccttgctgtgtgatagtgagttctttgctcaacccctctggactctcaccatttcatcccattctttattccccag

SEQ ID NO: 1220 - DNA, 377 bp, Artificial
  Synthetic oligonucleotide
gtaagtgagaaatgatggttggttgcttctgccatttggggaaagtgagaaaaggggaagaattgtgtctctatgattacatgaaggccagatataagtgaatgccgattcctcagccaattgagagaacaggcatatggttgttttattattttaaactcaggtaactcacaaaacagtcactaatcccaaactttgaagtattcagaagtaatagaaaattacaaatgtatttcttcactcctagagacagggaggaaaaagtgggacaagaaggaggcagctccacctctgtagtatttgctgcccctacagggcaccaggtttcgaggcaaactcctctgggtgtgaggtcagtacagctcaggggatggaga

SEQ ID NO: 1221 - DNA, 421 bp, Artificial
  Synthetic oligonucleotide
ccaggtcatatgatcattaagtgaaagagagagaattagaactcctttctccaaagccagaaactacagaatgcattccaaagccagagagcaggatttagggatcctattccaccagcatttctccacaaaaggagctaccggtgtttagaaaggccatctttgttatgctccatgacttttgccctgttaaatgcttagtatcccaggccccagaaagccctataagccagtagagaaccacactcttgttgtcactgagacaacctgaaaggtttccacacttccccctgggtggggaatgggtcccactgagaaccattgactgttctgattgatgatggcagggtgcttgtttttgtttttaatttgcagcttctggttatcaagaccaaataggttttctctccccaatttttag

SEQ ID NO: 1222 - DNA, 312 bp, Artificial
  Synthetic oligonucleotide
gtaagagtcctgtctctgaatactaagggacctctaagtctacaggtggtcaaaatgctgtatccacccaattccactaaatggaataaatgaataaatgaatgaattcatttattccatttcctcagttcctccccaaattacacctctgccaggaaacagagggcgctccgacttgttcaggtgtactttcttgagtttcacctccatccctcctgctgtatgtagagctcagctgtgctgtctggcaatggaggattgctgccgaggtgctcccgctgacctcttttctcctttccttctcccgcaaag

SEQ ID NO: 1223 - DNA, 318 bp, Artificial
  Synthetic oligonucleotide
gcggcagaactacatcggggccaccaaatcaccactcttcagccccatcccactccctgtttcgggcctcgtctgctgggaaagtcacttttccagtatgtctcctggcctcttatgatgagatttctggtcaaggagcgagctctcaggatacgaagacatttgacgttgcgctgtccgaggagctccatgcggcactgagtgagtggctgacagcgatccgggcttggttttgtgaggttccttcaagctaagccagctcagagaacacggggagcggtggtgctacacggacttcggagcatagagtggcgctga

SEQ ID NO: 1224 - DNA, 226 bp, Artificial
  Synthetic oligonucleotide
gtgagtggctgagaccgaccacggttcttgacttagtggaattgggtcgaaggagtggagaatgggagggctcgggctactgagagtggagatgggggcgggggtggtggtgaagagagttggagaaggaatggacgagttcttgagcaaaaggaggggaagagacaatctccagccacccgccccacgcttgacttcttatcactttggctgtggtgccgcctag

SEQ ID NO: 1225 - DNA, 247 bp, Artificial
  Synthetic oligonucleotide
agtccatcaaaccccatgagcccgaccactctcgctcttccttacattcccacgtcccccttctctcccaacccctcatatcagcaagggaaattaattaatgagatttgataaatcagtagatagaatgaggtccccattctgaaatatttagcagactggaaccaccacgcaagcctctgtagggggtggatggagacacttctaactttaataaactgcgactgaacgtggaatcctagaaaaa

SEQ ID NO: 1226 - DNA, 27 bp, Artificial
  Synthetic oligonucleotide
tctagaggatccgccaagaggtagaag

SEQ ID NO: 1227 - DNA, 28 bp, Artificial
  Synthetic oligonucleotide
tatccatttgttctcaagaggtagcaag

SEQ ID NO: 1228 - DNA, 55 bp, Artificial
  Synthetic oligonucleotide
ctaattggcagaatctctgacctccactttctctgactcccttctcccttcctag

SEQ ID NO: 1229 - DNA, 84 bp, Artificial
  Synthetic oligonucleotide
ttcctctgttttgtgtgtcgtgaatccaaggaccacaaatcccataatgtcagcttgatcgaagaagctgcccagaattatcag

SEQ ID NO: 1230 - DNA, 109 bp, Artificial
  Synthetic oligonucleotide
gagaatggaaaggatgtgaaaatttgactcagaaggtttgggctcaagcccagtcttgtgagtttactgtacaacctgcaaggaatcactttacctctctgagcctcag

SEQ ID NO: 1231 - DNA, 96 bp, Artificial
  Synthetic oligonucleotide
gggcagattcaagagcagatccaagtcttgcagcaaaaggagaaggagacagtacaagtgaaggcacaaggtgtacacagggtcgatgtcttcacg

SEQ ID NO: 1232 - DNA, 23 bp, Artificial
  Synthetic oligonucleotide
gatatcaaagtcgtcttgtgcag

SEQ ID NO: 1233 - DNA, 24 bp, Artificial
  Synthetic oligonucleotide
gtatacaaagtcgtcttgtggcag

SEQ ID NO: 1234 - DNA, 62 bp, Artificial
  Synthetic oligonucleotide
atcctccttctcccacacctcatcccctgatctcaccaaccagctcaaccacatcttcctag

SEQ ID NO: 1235 - DNA, 44 bp, Artificial
  Synthetic oligonucleotide
aagtgaagagtttcagtttctcaacccaacccctgttcctctgg

SEQ ID NO: 1236 - DNA, 72 bp, Artificial
  Synthetic oligonucleotide
aactggagaaaaaactcagtgaagcaaaatcaagacacgactccatcacagggagcctgaaaaaattcaaag

SEQ ID NO: 1237 - DNA, 75 bp, Artificial
  Synthetic oligonucleotide
accaactccaggctgataggaaaaaagatgaaaacagattcttcaaaagcatgaataaaaatgacatgaagagct

SEQ ID NO: 1238 - DNA, 66 bp, Artificial
  Synthetic oligonucleotide
ggggcttgttacagaaaaataatcataaaatgaacaaaacctcagagcccgggtcatcttctgcag

SEQ ID NO: 1239 - DNA, 113 bp, Artificial
  Synthetic oligonucleotide
tggaaaaaggaagtccctgcagcagtccccgcactctttaagcagctgtttaccgaaggcaccagttcagccaggagtgaaatccggagaggagcaacgccagcctgggtcac

SEQ ID NO: 1240 - protein, 425 aa, Homo sapiens
MASGQFVNKLQEEVICPICLDILQKPVTIDCGHNFCLKCITQIGETSCGFFKCPLCKTSVRKNAIRFNSLLRNLVEKIQALQASEVQSKRKEATCPRHQEMFHYFCEDDGKFLCFVCRESKDHKSHNVSLIEEAAQNYQGQIQEQIQVLQQKEKETVQVKAQGVHRVDVFTDQVEHEKQRILTEFELLHQVLEEEKNFLLSRIYWLGHEGTEAGKHYVASTEPQLNDLKKLVDSLKTKQNMPPRQLLEDIKVVLCRSEEFQFLNPTPVPLELEKKLSEAKSRHDSITGSLKKFKDQLQADRKKDENRFFKSMNKNDMKSWGLLQKNNHKMNKTSEPGSSSAGGRTTSGPPNHHSSAPSHSLFRASSAGKVTFPVCLLASYDEISGQGASSQDTKTFDVALSEELHAALSEWLTAIRAWFCEVPSS

SEQ ID NO: 1241 - protein, 425 aa, Homo sapiens
MASGQFVNKLQEEVICPICLDILQKPVTIDCGHNFCLKCITQIGETSCGFFKCPLCKTSVRRDAIRFNSLLRNLVEKIQALQASEVQSKRKEATCPRHQEMFHYFCEDDGKFLCFVCRESKDHKSHNVSLIEEAAQNYQGQIQEQIQVLQQKEKETVQVKAQGVHRVDVFTDQVEHEKQRILTEFELLHQVLEEEKNFLLSRIYWLGHEGTEAGKHYVASTEPQLNDLKKLVDSLKTKQNMPPRQLLEDIKVVLCRSEEFQFLNPTPVPLELEKKLSEAKSRHDSITGSLKKFKDQLQADRKKDENRFFKSMNKNDMKSWGLLQKNNHKMNKTSEPGSSSAGGRTTSGPPNHHSSAPSHSLFRASSAGKVTFPVCLLASYDEISGQGASSQDTKTFDVALSEELHAALSEWLTAIRAWFCEVPSS

SEQ ID NO: 1242 - protein, 425 aa, Homo sapiens [sequence omitted]

SEQ ID NO: 1243 - protein, 236 aa, Homo sapiens
MASGQFVNKLQEEVICPICLDILQKPVTIDCGHNFCPQCITQIGETSCGFFKCPLCKTSVRRDAIRFNSLLRNLVEKIQALQASEVQSKRKEATCPRHQEMFHYFCEDDGKFLCFVCRESKDHKSHNVSLIEEAAQNYQGQIQEQIQVLQQKEKETVQVKAQGVHRVDVFTDQVEHEKQRILTEFELLHQVLEEEKNFLLSRIYWLGHEGTEAGKHYVEIPLMPTVERSQEARCYP

SEQ ID NO: 1244 - protein, 425 aa, Homo sapiens; identical to SEQ ID NO: 1241

SEQ ID NO: 1245 - protein, 267 aa, Homo sapiens
MASGQFVNKLQEEVICPICLDILQKPVTIDCGHNFCLKCITQIGETSCGFFKCPLCKTSVRRDAIRFNSLLRNLVEKIQALQASEVQSKRKEATCPRHQEMFHYFCEDDGKFLCFVCRESKDHKSHNVSLIEEAAQNYQGQIQEQIQVLQQKEKETVQVKAQGVHRVDVFTDQVEHEKQRILTEFELLHQVLEEEKNFLLSRIYWLGHEGTEAGKHYVASTEPQLNDLKKLVDSLKTKQNMPPRQLLENWRKNSVKQNQDTTPSQGA

SEQ ID NO: 1246 - protein, 425 aa, Homo sapiens; identical to SEQ ID NO: 1240

SEQ ID NO: 1247 - protein, 267 aa, Homo sapiens [sequence omitted]

SEQ ID NO: 1248 - protein, 260 aa, Homo sapiens
MASGQFVNKLQEEVICPICLDILQKPVTIDCGHNFCLKCITQIGETSCGFFKCPLCKTSVRKNAIRFNSLLRNLVEKIQALQASEVQSKRKEATCPRHQEMFHYFCEDDGKFLCFVCRESKDHKSHNVSLIEEAAQNYQGQIQEQIQVLQQKEKETVQVKAQGVHRVDVFTDQVEHEKQRILTEFELLHQVLEEEKNFLLSRIYWLGHEGTEAGKHYVASTEPQLNDLKKLVDSLKTKQNMPPRQLLEDIKVVLCRPTPG

SEQ ID NO: 1249 - protein, 310 aa, Homo sapiens
MASGQFVNKLQEEVICPICLDILQKPVTIDCGHNFCLKCITQIGETSCGFFKCPLCKTSVRKNAIRFNSLLRNLVEKIQALQASEVQSKRKEATCPRHQEMFHYFCEDDGKFLCFVCRESKDHKSHNVSLIEEAAQNYQGQIQEQIQVLQQKEKETVQVKAQGVHRVDVFTDQVEHEKQRILTEFELLHQVLEEEKNFLLSRIYWLGHEGTEAGKHYVASTEPQLNDLKKLVDSLKTKQNMPPRQLLEDIKVVLCRSSFSHTSSPDLTNQLNHIFLEVKSFSFSTQPLFLWNWRKNSVKQNQDTTPSQGA

SEQ ID NO: 1250 - protein, 349 aa, Homo sapiens
MASGQFVNKLQEEVICPICLDILQKPVTIDCGHNFCLKCITQIGETSCGFFKCPLCKTSVRKNAIRFNSLLRNLVEKIQALQASEVQSKRKEATCPRHQEMFHYFCEDDGKFLCFVCRESKDHKSHNVSLIEEAAQNYQGQIQEQIQVLQQKEKETVQVKAQGVHRVDVFTDQVEHEKQRILTEFELLHQVLEEEKNFLLSRIYWLGHEGTEAGKHYVASTEPQLNDLKKLVDSLKTKQNMPPRQLLEDIKVVLCRSEEFQFLNPTPVPLELEKKLSEAKSRHDSITGSLKKFKDQLQADRKKDENRFFKSMNKNDMKSWGLLQKNNHKMNKTSEPGSSSAGKSPVSEY

SEQ ID NO: 1251 - protein, 262 aa, Homo sapiens
MASGQFVNKLQEEVICPICLDILQKPVTIDCGHNFCLKCITQIGETSCGFFKCPLCKTSVRKNAIRFNSLLRNLVEKIQALQASEVQSKRKEATCPRHQEMFHYFCEDDGKFLCFVCRESKDHKSHNVSLIEEAAQNYQGQIQEQIQVLQQKEKETVQVKAQGVHRVDVFTDQVEHEKQRILTEFELLHQVLEEEKNFLLSRIYWLGHEGTEAGKHYVASTEPQLNDLKKLVDSLKTKQNMPPRQLLEDIKVVLCRTGEKTQ

SEQ ID NO: 1252 - protein, 114 aa, Homo sapiens
MNKNDMKSWGLLQKNNHKMNKTSEPGSSSAGGRTTSGPPNHHSSAPSHSLFRASSAGKVTFPVCLLASYDEISGQGASSQDTKTFDVALSEELHAALSEWLTAIRAWFCEVPSS

SEQ ID NO: 1253 - protein, 110 aa, Homo sapiens
MNEFIYSISSVPPQITPLPGNRGRSDLFRCTFLSFTSIPPAVCRAQLCCLAMEDCCRGAPADLFSPFLLPQRRQNYIGATKSPLFSPIPLPVSGLVCWESHFSSMSPGLL

SEQ ID NO: 1254 - protein, 321 aa, Homo sapiens
MASGQFVNKLQEEVICPICLDILQKPVTIDCGHNFCLKCITQIGETSCGFFKCPLCKTSVRKNAIRFNSLLRNLVEKIQALQASEVQSKRKEATCPRHQEMFHYFCEDDGKFLCFVCRESKDHKSHNVSLIEEAAQNYQGQIQEQIQVLQQKEKETVQVKAQGVHRVDVFTDQVEHEKQRILTEFELLHQVLEEEKNFLLSRIYWLGHEGTEAGKHYVASTEPQLNDLKKLVDSLKTKQNMPPRQLLEDIKVVLCRSEEFQFLNPTPVPLELEKKLSEAKSRHDSITGSLKKFKDQLQADRKKDENRFFKSMNKNDMKSCK

SEQ ID NO: 1255 - protein, 56 aa, Homo sapiens
MLVLWLWKDSFYFLQQRQPQRTGLRAFSVQTPNLSRHHRPIQLAKALRTVHPKPME

SEQ ID NO: 1256 - protein, 196 aa, Homo sapiens
MASGQFVNKLQEEVICPICLDILQKPVTIDCGHNFCLKCITQIGETSCGFFKCPLCKTSVRKNAIRFNSLLRNLVEKIQALQASEVQSKRKEATCPRHQEMFHYFCEDDGKFLCFVCRESKDHKSHNVSLIEEAAQNYQGQIQEQIQVLQQKEKETVQVKAQGVHRVDVFTVRKTPSHDLWKQKHLCQSSWNPLLH

SEQ ID NO: 1257 - protein, 425 aa, Homo sapiens; identical to SEQ ID NO: 1240

SEQ ID NO: 1258 - protein, 342 aa, Homo sapiens
MHHSDWGNIMWIFQMSPLQNFRKEERNQFLCFVCRESKDHKSHNVSLIEEAAQNYQGQIQEQIQVLQQKEKETVQVKAQGVHRVDVFTDQVEHEKQRILTEFELLHQVLEEEKNFLLSRIYWLGHEGTEAGKHYVASTEPQLNDLKKLVDSLKTKQNMPPRQLLEDIKVVLCRSEEFQFLNPTPVPLELEKKLSEAKSRHDSITGSLKKFKDQLQADRKKDENRFFKSMNKNDMKSWGLLQKNNHKMNKTSEPGSSSAGGRTTSGPPNHHSSAPSHSLFRASSAGKVTFPVCLLASYDEISGQGASSQDTKTFDVALSEELHAALSEWLTAIRAWFCEVPSS

SEQ ID NO: 1259 - protein, 185 aa, Homo sapiens
MPPRQLLEDIKVVLCRSEEFQFLNPTPVPLELEKKLSEAKSRHDSITGSLKKFKDQLQADRKKDENRFFKSMNKNDMKSWGLLQKNNHKMNKTSEPGSSSAGGRTTSGPPNHHSSAPSHSLFRASSAGKVTFPVCLLASYDEISGQGASSQDTKTFDVALSEELHAALSEWLTAIRAWFCEVPSS

SEQ ID NO: 1260 - DNA, 23 bp, Artificial
  Synthetic oligonucleotide
tttcttagcaccaccacgaagtc

SEQ ID NO: 1261 - DNA, 101 bp, Artificial
  Synthetic oligonucleotide
ctggcaagcagctggaagatggacgtactttgtctgactacaatattcaaaaggagtctactcttcatcttgtgttgagacttcgtggtggtgctaagaaa

SEQ ID NO: 1262 - DNA, 23 bp, Artificial
  Synthetic oligonucleotide
tggcaagaagaaggtctggttag

SEQ ID NO: 1263 - DNA, 22 bp, Artificial
  Synthetic oligonucleotide
tgatcagcccatctttgatgag

SEQ ID NO: 1264 - DNA, 101 bp, Artificial
  Synthetic oligonucleotide
tggcaagaagaaggtctggttagaccccaatgagaccaatgaaatcgccaatgccaactcccgtcagcagatccggaagctcatcaaagatgggctgatca

SEQ ID NO: 1265 - DNA, 20 bp, Artificial
  Synthetic oligonucleotide
cggtttgctgcggtaatcat

SEQ ID NO: 1266 - DNA, 21 bp, Artificial
  Synthetic oligonucleotide
tttcttgctgccagtctggac

SEQ ID NO: 1267 - DNA, 122 bp, Artificial
  Synthetic oligonucleotide
cggtttgctgcggtaatcatgaggataagagagccacgaaccacggcactgattttcagttctgggaaaatggtgtgcacaggagccaagagtgaagaacagtccagactggcagcaagaaa

SEQ ID NO: 1268 - DNA, 19 bp, Artificial
  Synthetic oligonucleotide
atttgggtcgcggttcttg

SEQ ID NO: 1269 - DNA, 21 bp, Artificial
  Synthetic oligonucleotide
tgccttgacattctcgatggt

SEQ ID NO: 1270 - DNA, 133 bp, Artificial
  Synthetic oligonucleotide
atttgggtcgcggttcttgtttgtggatcgctgtgatcgtcacttgacaatgcagatcttcgtgaagactctgactggtaagaccatcaccctcgaggttgagcccagtgacaccatcgagaatgtcaaggca

SEQ ID NO: 1271 - DNA, 20 bp, Artificial
  Synthetic oligonucleotide
tgggaacaagagggcatctg

SEQ ID NO: 1272 - DNA, 22 bp, Artificial
  Synthetic oligonucleotide
ccaccactgcatcaaattcatg

SEQ ID NO: 1273 - DNA, 86 bp, Artificial
  Synthetic oligonucleotide
tgggaacaagagggcatctgctaaagtttcagattccatttctgctcagtatccagtagtggatcatgaatttgatgcagtggtgg

SEQ ID NO: 1274 - DNA, 21 bp, Homo sapiens
ggcgtctttctccctctgaac

SEQ ID NO: 1275 - DNA, 20 bp, Homo sapiens
gtcccattctgggtgctgtg

SEQ ID NO: 1276 - DNA, 114 bp, Homo sapiens
ggcgtctttctccctctgaacctcagtttccacctgtgtcgagtgtgggtgagacccctcgcggggagctatgcaggttacggagaaaaggcagcacagcacccagaatgggac

SEQ ID NO: 1277 - DNA, 21 bp, Homo sapiens
ccagcaatccacacaagagct

SEQ ID NO: 1278 - DNA, 21 bp, Homo sapiens
cagggtctggtccaatcagag

SEQ ID NO: 1279 - DNA, 144 bp, Artificial
  Synthetic oligonucleotide
ccagcaatccacacaagagctctttatccccaacatcactgtgaataatagcggatcctatatgtgccaagcccataactcagccactggcctcaataggaccacagtcacgatgatcacagtctctgattggaccagaccctg

SEQ ID NO: 1280 - DNA, 21 bp, Artificial
  Synthetic oligonucleotide
ccagcaatccacacaagagct

SEQ ID NO: 1281 - DNA, 21 bp, Artificial
  Synthetic oligonucleotide
cagggtctggtccaatcagag

SEQ ID NO: 1282 - DNA, 144 bp, Artificial; identical to SEQ ID NO: 1279
  Synthetic oligonucleotide

SEQ ID NO: 1283 - DNA, 21 bp, Artificial
  Synthetic oligonucleotide
gtccttccagtgcaagaccca

SEQ ID NO: 1284 - DNA, 16 bp, Artificial
  Synthetic oligonucleotide
tgggcctggcaaagcc

SEQ ID NO: 1285 - DNA, 149 bp, Artificial
  Synthetic oligonucleotide
gtccttccagtgcaagacccaaaaccgccagggccacctgtggcctcctcgtcctcggccactagcctgccgtggcccgtggtcatcggcatcccagccggcgctgtcttcatcctgggcaccctgctcctgtggctttgccaggccca

SEQ ID NO: 1286 - DNA, 19 bp, Artificial
  Synthetic oligonucleotide
ccgacggctcctacctcaa

SEQ ID NO: 1287 - DNA, 21 bp, Artificial
  Synthetic oligonucleotide
ggaagctgtagcccatggtgt

SEQ ID NO: 1288 - DNA, 102 bp, Artificial
  Synthetic oligonucleotide
ccgacggctcctacctcaataagctgctcatcacccgtgcccgccaggacgatgcgggcatgtacatctgccttggcgccaacaccatgggctacagcttcc

SEQ ID NO: 1289 - DNA, 25 bp, Artificial
  Synthetic oligonucleotide
gaaggcacaggaaaaacagatattg

SEQ ID NO: 1290 - DNA, 21 bp, Artificial
  Synthetic oligonucleotide
tggtgctcttggtcacaggat

SEQ ID NO: 1291 - DNA, 119 bp, Artificial
  Synthetic oligonucleotide
gaaggcacaggaaaaacagatattgcatcacgttaccctaccctttggactgaacaggttaaaagtcggcagaacaaaaccaataagaattcagtgtcatcctgtgaccaagagcacca

SEQ ID NO: 1292 - DNA, 22 bp, Artificial
  Synthetic oligonucleotide
ctcctgaaccctactccaagca

SEQ ID NO: 1293 - DNA, 21 bp, Artificial
  Synthetic oligonucleotide
caggcgatcctatggaaatcc

SEQ ID NO: 1294 - DNA, 101 bp, Artificial
  Synthetic oligonucleotide
ctcctgaaccctactccaagcacagcctctgtctgactcccttgtccttcaagagaactgttctccaggtctcagggccaggatttccataggatcgcctg

SEQ ID NO: 1295 - DNA, 26 bp, Homo sapiens
acactaaaagaacaaacaccttgctc

SEQ ID NO: 1296 - DNA, 22 bp, Homo sapiens
tcctcagaaggcacatgaaaga

SEQ ID NO: 1297 - DNA, 106 bp, Artificial
  Synthetic oligonucleotide
acactaaaagaacaaacaccttgctcttcgagatgagacattttgccaagcagttgaccacttagttctcaagaagcaactatctctttcatgtgccttctgagga

SEQ ID NO: 1298 - DNA, 20 bp, Homo sapiens
agtgatggagcaaagtgccg

SEQ ID NO: 1299 - DNA, 21 bp, Homo sapiens
cagcagctgatgcaaactgag

SEQ ID NO: 1300 - DNA, 132 bp, Artificial
  Synthetic oligonucleotide
agtgatggagcaaagtgccgggatcatgtaccgcaagtcctgtgcatcatcagcggcctgtctcatcgcctctgccgggtaccagtccttctgctccccagggaaactgaactcagtttgcatcagctgctg

SEQ ID NO: 1301 - DNA, 30 bp, Homo sapiens
cggtgacgttgtttaatagaatatatctgt

SEQ ID NO: 1302 - DNA, 25 bp, Homo sapiens
aagaaacgtgcaatttatctttgct

SEQ ID NO: 1303 - DNA, 103 bp, Artificial
  Synthetic oligonucleotide
cggtgacgttgtttaatagaatatatctgttcattcagttgcctgttttgtggttgaacctgtgatagccaccagggaagcaaagataaattgcacgtttctt

SEQ ID NO: 1304 - DNA, 22 bp, Artificial
  Synthetic oligonucleotide
ggcaatgtattccaagatgcag

SEQ ID NO: 1305 - DNA, 25 bp, Artificial
  Synthetic oligonucleotide
tctgtatgggtctcttacggtttct

SEQ ID NO: 1306 - DNA, 96 bp, Artificial
  Synthetic oligonucleotide
ggcaatgtattccaagatgcagtcttcaatcaaacagttacagttattgaaagagaggatgggttagatggagaaaccgtaagagacccatacaga

SEQ ID NO: 1307 - DNA, 27 bp, Artificial
  Synthetic oligonucleotide
atgggttagatggagaaacataaagct

SEQ ID NO: 1308 - DNA, 25 bp, Artificial
  Synthetic oligonucleotide
tgcacaaaggaacatttactcatca

SEQ ID NO: 1309 - DNA, 102 bp, Artificial
  Synthetic oligonucleotide
atgggttagatggagaaacataaagcttcaccaagaaggttgcccaggaaacgggcacagaagagatcagtgggatctgatgagtaaatgttcctttgtgca

SEQ ID NO: 1310 - DNA, 25 bp, Artificial
  Synthetic oligonucleotide
acatttggttcttccaagggactac

SEQ ID NO: 1311 - DNA, 19 bp, Artificial
  Synthetic oligonucleotide
tcgatctcagagggcaccc

SEQ ID NO: 1312 - DNA, 111 bp, Artificial
  Synthetic oligonucleotide
acatttggttcttccaagggactactggcgtttccaccccagcacccggcgtgtagacagtcccgtgccccgcagggccactgactggagaggggtgccctctgagatcga

SEQ ID NO: 1313 - DNA, 19 bp, Artificial
  Synthetic oligonucleotide
cactgccccagcttatccc

SEQ ID NO: 1314 - DNA, 21 bp, Artificial
  Synthetic oligonucleotide
ctctcccagcctcagtttcct

SEQ ID NO: 1315 - DNA, 108 bp, Artificial
  Synthetic oligonucleotide
cactgccccagcttatcccaggcctcccgcttccctctgcgggtggggtgctgagcaggcattattggcctgcatgttttactgatgaggaaactgaggctgggagag

SEQ ID NO: 1316 - DNA, 22 bp, Artificial
  Synthetic oligonucleotide
atttccatcctcaactggcaga

SEQ ID NO: 1317 - DNA, 16 bp, Artificial
  Synthetic oligonucleotide
tgccctggaacccacg

SEQ ID NO: 1318 - DNA, 104 bp, Artificial
  Synthetic oligonucleotide
atttccatcctcaactggcagagatgagagcctggagcattgcagatgccagggacttcacaaatgaaggcacagcatgggaaacctgcgtgggttccagggca

SEQ ID NO: 1319 - DNA, 24 bp, Artificial
  Synthetic oligonucleotide
tggagattcctggtttaaagcatt

SEQ ID NO: 1320 - DNA, 20 bp, Artificial
  Synthetic oligonucleotide
ccccagcttagagctgcact

SEQ ID NO: 1321 - DNA, 105 bp, Artificial
  Synthetic oligonucleotide
tggagattcctggtttaaagcatttaaagcctctgtgaaaatttgcccaggccaacaacttcactttccacactcagtgccacgaagtgcagctctaagctgggg

SEQ ID NO: 1322 - DNA, 21 bp, Homo sapiens
cattctccacgcatcagatga

SEQ ID NO: 1323 - DNA, 20 bp, Homo sapiens
accatcagattggcagcatg

SEQ ID NO: 1324 - DNA, 114 bp, Homo sapiens
cattctccacgcatcagatgatcctgtggcccctcagtgccaggccccactggccctctgcgcacatcagtgactctgatgttctcccccaccgcatgctgccaatctgatggt

SEQ ID NO: 1325 - DNA, 19 bp, Homo sapiens
gaatcagcccaaagccagg

SEQ ID NO: 1326 - DNA, 20 bp, Homo sapiens
gctggtgaaagcactgggtt

SEQ ID NO: 1327 - DNA, 114 bp, Homo sapiens
gaatcagcccaaagccaggcgtccagggtctccctcacctgaagctgactttttccccaccttggacagagggcgggagatgccatccccactgaacccagtgctttcaccagc

SEQ ID NO: 1328 - DNA, 19 bp, Homo sapiens
catggaccccaggcaagtc

SEQ ID NO: 1329 - DNA, 21 bp, Homo sapiens
ctgtttagggtcgaggctgtg

SEQ ID NO: 1330 - DNA, 123 bp, Homo sapiens
catggaccccaggcaagtccccccacccacgcatttctaatcatctgccctggttttgcctcctgagtctgttaaggctgtgtgcccctcatcgaggcccgtcacagcctcgaccctaaacag

SEQ ID NO: 1331 - DNA, 50 bp, Homo sapiens
agagaatatcactccgatggtcggtttctgactgtcacgctaagggcaac

SEQ ID NO: 1332 - DNA, 50 bp, Homo sapiens
gaacacagagaacgtcagcggtgaaggcgagaaccgaggctgctgtggaa

SEQ ID NO: 1333 - DNA, 50 bp, Homo sapiens
ggcccagcattgggaaccttgagcatgtgtctgaaaatgggcatcattct

SEQ ID NO: 1334 - DNA, 50 bp, Homo sapiens
gactcaggagatgaacagctcccaactatttgccgggaagacccagagat

SEQ ID NO: 1335 - DNA, 21 bp, Artificial
  Synthetic oligonucleotide
cagcaggaaattcggtgtgtc

SEQ ID NO: 1336 - DNA, 19 bp, Artificial
  Synthetic oligonucleotide
tcaaggttcccaatgctgg

SEQ ID NO: 1337 - DNA, 142 bp, Artificial
  Synthetic oligonucleotide
cagcaggaaattcggtgtgtcataaccatcataaccataattccataggaaagcaagttcccacctcaacaaatgccaatctcaataatgccaatatgtccaaagctgcccatggaaagcggcccagcattgggaaccttga

SEQ ID NO: 1338 - DNA, 50 bp, Homo sapiens
caagaggggtttggctgagactttaggattgtgattcagcttagagggac

SEQ ID NO: 1339 - DNA, 50 bp, Homo sapiens
tcctgcctgtcacctgaagttctagatcattccctggactccactctatc

SEQ ID NO: 1340 - DNA, 17 bp, Artificial
  Synthetic oligonucleotide
cggcctcccaaagtgct

SEQ ID NO: 1341 - DNA, 23 bp, Artificial
  Synthetic oligonucleotide
gggaagctcctgattgtagaagg

SEQ ID NO: 1342 - DNA, 125 bp, Artificial
  Synthetic oligonucleotide
cggcctcccaaagtgctgggattacaggcgtgagccaccgcacccggccgatttggactttttaacacaggattgggacaggattcagagggacactgtggcccttctacaatcaggagcttccc

SEQ ID NO: 1343 - DNA, 24 bp, Artificial
  Synthetic oligonucleotide
ctggagcatcagcatcatattctg

SEQ ID NO: 1344 - DNA, 20 bp, Artificial
  Synthetic oligonucleotide
gagagttggccgagatggag

SEQ ID NO: 1345 - DNA, 151 bp, Artificial
  Synthetic oligonucleotide
ctggagcatcagcatcatattctggggtggagtctatctggttctcaccaaagagccaagaagacattttctttcccagtctgtgttccatgggcacaaggaaatcccaaattctatcctgagccccctcactccatctcggccaactctc

SEQ ID NO: 1346 - DNA, 21 bp, Artificial
  Synthetic oligonucleotide
gaagcagagtcccccagaact

SEQ ID NO: 1347 - DNA, 20 bp, Artificial
  Synthetic oligonucleotide
aaggcccaggctagtgcatt

SEQ ID NO: 1348 - DNA, 111 bp, Artificial
  Synthetic oligonucleotide
gaagcagagtcccccagaactgggcttttcattcccctggtgggagcccatgagaagcgagttctctgtgcaacggacttagtaaatacagaatgcactagcctgggcctt

SEQ ID NO: 1349 - DNA, 19 bp, Artificial
  Synthetic oligonucleotide
tggtctggactcaatcccg

SEQ ID NO: 1350 - DNA, 21 bp, Artificial
  Synthetic oligonucleotide
ggagtctgagtccaagcagcc

SEQ ID NO: 1351 - DNA, 104 bp, Artificial
  Synthetic oligonucleotide
tggtctggactcaatcccgggactttaggacttttgctagaaatctggtgtggtgcaggagcgactccaggattcactctgtgggctgcttggactcagactcc

SEQ ID NO: 1352 - DNA, 22 bp, Artificial
  Synthetic oligonucleotide
cttcttgtccacggttttgttg

SEQ ID NO: 1353 - DNA, 20 bp, Artificial
  Synthetic oligonucleotide
aacattcctggccacctgaa

SEQ ID NO: 1354 - DNA, 101 bp, Artificial
  Synthetic oligonucleotide
cttcttgtccacggttttgttgagttttcactcttctaatgcaagggtctcacactgtgaaccacttaggatgtgatcactttcaggtggccaggaatgtt

SEQ ID NO: 1355 - DNA, 19 bp, Artificial
  Synthetic oligonucleotide
ctgctgggcatcctcgtct

SEQ ID NO: 1356 - DNA, 19 bp, Artificial
  Synthetic oligonucleotide
cgtacccaggtgccatctg

SEQ ID NO: 1357 - DNA, 101 bp, Artificial
  Synthetic oligonucleotide
ctgggcatcctcgtcttctcactgcactgccccagtgtgcccatggcgggcgtcacagccagctacggcgggaggtgagggccagatggcacctgggtacg

SEQ ID NO: 1358 - DNA, 21 bp, Artificial
  Synthetic oligonucleotide
tggcaagtttgtagacccgaa

SEQ ID NO: 1359 - DNA, 19 bp, Artificial
  Synthetic oligonucleotide
ggtagggtccaggccagag

SEQ ID NO: 1360 - DNA, 101 bp, Artificial
  Synthetic oligonucleotide
tggcaagtttgtagacccgaaatgcaggctgcatggggacgagccccatggctgaccctgtgcctgctgggcgccagcatggctctggcctggaccctacc

SEQ ID NO: 1361 - DNA, 18 bp, Artificial
  Synthetic oligonucleotide
cctttgccctgggaatcc

SEQ ID NO: 1362 - DNA, 16 bp, Artificial
  Synthetic oligonucleotide
gccctgctggccacac

SEQ ID NO: 1363 - DNA, 125 bp, Artificial
  Synthetic oligonucleotide
cctttgccctgggaatccagtggattgtagttagaatactagggggcatcccggggcccatcgccttcggctgggtgatcgacaaggcctgtctgctgtggcaggaccagtgtggccagcagggc

SEQ ID NO: 1364 - DNA, 21 bp, Artificial
  Synthetic oligonucleotide
ccgtgatggatgtggagtctc

SEQ ID NO: 1365 - DNA, 20 bp, Artificial
  Synthetic oligonucleotide
gcatcggaagcaaatgcatt

SEQ ID NO: 1366 - DNA, 111 bp, Artificial
  Synthetic oligonucleotide
ccgtgatggatgtggagtctcggctttctgacaacgtcttccagagcaggctttctctagagggtggactgcctgtgttctcctgggagagaatgcatttgcttccgatgc

SEQ ID NO: 1367 - DNA, 19 bp, Artificial
  Synthetic oligonucleotide
gcttgccctttcatgtgga

SEQ ID NO: 1368 - DNA, 23 bp, Artificial
  Synthetic oligonucleotide
tcacgatgagacctgacactctg

SEQ ID NO: 1369 - DNA, 111 bp, Artificial
  Synthetic oligonucleotide
gcttgccctttcatgtggagcactgtgattggacccaagttggcaagagtggaagaccaggggacagaacagaaatccccatggtggccagagtgtcaggtctcatcgtga

SEQ ID NO: 1370 - DNA, 18 bp, Artificial
  Synthetic oligonucleotide
gtgcccagtccccctgtc

SEQ ID NO: 1371 - DNA, 19 bp, Artificial
  Synthetic oligonucleotide
cctggcccgtttaactgga

SEQ ID NO: 1372 - DNA, 93 bp, Artificial
  Synthetic oligonucleotide
gtgcccagtccccctgtcagaccctcaatgactgaggcctgggggatccctcccttacctcagcttctcccatttccagttaaacgggccagg

SEQ ID NO: 1373 - DNA, 19 bp, Artificial
  Synthetic oligonucleotide
agcaaggacgcgactctcc

SEQ ID NO: 1374 - DNA, 21 bp, Artificial
  Synthetic oligonucleotide
aatccagcgtctaagcagctg

SEQ ID NO: 1375 - DNA, 121 bp, Artificial
  Synthetic oligonucleotide
agcaaggacgcgactctcccgacgcggggaggctattctgcccatttggggacacttccccgccgctgccaggacccgcttctctgaaaggctctccttgcagctgcttagacgctggatt

SEQ ID NO: 1376 - DNA, 24 bp, Artificial
  Synthetic oligonucleotide
tgcctactgattcatccacataca

SEQ ID NO: 1377 - DNA, 15 bp, Artificial
  Synthetic oligonucleotide
gcattccccggctgc

SEQ ID NO: 1378 - DNA, 125 bp, Artificial
  Synthetic oligonucleotide
tgcctactgattcatccacatacaattctcagcgtatatccaaatgcagtcaacattcctctctcagaaatacccacccacctctaactctgcattcatacatttaggctgcagccggggaatgc

SEQ ID NO: 1379 - DNA, 26 bp, Artificial
  Synthetic oligonucleotide
taagtctacaggtggtcaaaatgctg

SEQ ID NO: 1380 - DNA, 18 bp, Artificial
  Synthetic oligonucleotide
ggagcgccctctgtttcc

SEQ ID NO: 1381 - DNA, 138 bp, Artificial
  Synthetic oligonucleotide
taagtctacaggtggtcaaaatgctgtatccacccaattccactaaatggaataaatgaataaatgaatgaattcatttattccatttcctcagttcctccccaaattacacctctgccaggaaacagagggcgctcc

SEQ ID NO: 1382 - protein, 344 aa, Homo sapiens
MGPPSAPPCRLHVPWKEVLLTASLLTFWNPPTTAKLTIESTPFNVAEGKEVLLLAHNLPQNRIGYSWYKGERVDGNSLIVGYVIGTQQATPGPAYSGRETIYPNASLLIQNVTQNDTGFYTLQVIKSDLVNEEATGQFHVYPELPKPSISSNNSNPVEDKDAVAFTCEPEVQNTTYLWWVNGQSLPVSPRLQLSNGNMTLTLLSVKRNDAGSYECEIQNPASANRSDPVTLNVLYGPDGPTISPSKANYRPGENLNLSCHAASNPPAQYSWFINGTFQQSTQELFIPNITVNNSGSYMCQAHNSATGLNRTTVTMITVSGSAPVLSAVATVGITIGVLARVALI

SEQ ID NO: 1383 - DNA, 123 bp, Homo sapiens; identical to SEQ ID NO: 1330

SEQ ID NO: 1384 - protein, 295 aa, Homo sapiens
MLQGPGSLLLLFLASHCCLGSARGLFLFGQPDFSYKRSNCKPIPANLQLCHGIEYQNMRLPNLLGHETMKEVLEQAGAWIPLVMKQCHPDTKKFLCSLFAPVCLDDLDETIQPCHSLCVQVKDRCAPVMSAFGFPWPDMLECDRFPQDNDLCIPLASSDHLLPATEEAPKVCEACKNKNDDDNDIMETLCKNDFALKIKVKEITYINRDTKIILETKSKTIYKLNGVSERDLKKSVLWLKDSLQCTCEEMNDINAPYLVMGQKQGGELVITSVKRWQKGQREFKRISRSIRKLQC

SEQ ID NO: 1385 - protein, 504 aa, Homo sapiens
MTPSPLLLLLLPPLLLGAFPPAAAARGPPKMADKVVPRQVARLGRTVRLQCPVEGDPPPLTMWTKDGRTIHSGWSRFRVLPQGLKVKQVEREDAGVYVCKATNGFGSLSVNYTLVVLDDISPGKESLGPDSSSGGQEDPASQQWARPRFTQPSKMRRRVIARPVGSSVRLKCVASGHPRPDITWMKDDQALTRPEAAEPRKKKWTLSLKNLRPEDSGKYTCRVSNRAGAINATYKVDVIQRTRSKPVLTGTHPVNTTVDFGGTTSFQCKVRSDVKPVIQWLKRVEYGAEGRHNSTIDVGGQKFVVLPTGDVWSRPDGSYLNKLLITRARQDDAGMYICLGANTMGYSFRSAFLTVLPDPKPPGPPVASSSSATSLPWPVVIGIPAGAVFILGTLLLWLCQAQKKPCTPAPAPPLPGHRPPGTARDRSGDKDLPSLAALSAGPGVGLCEEHGSPAAPQHLLGPGPVAGPKLYPKLYTDIHTHTHTHSHTHSHVEGKVHQHIHYQC

SEQ ID NO: 1386 - protein, 504 aa, Homo sapiens
MTPSPLLLLLLPPLLLGAFPPAAAARGPPKMADKVVPRQVARLGRTVRLQCPVEGDPPPLTMWTKDGRTIHSGWSRFRVLPQGLKVKQVEREDAGVYVCKATNGFGSLSVNYTLVVLDDISPGKESLGPDSSSGGQEDPASQQWARPRFTQPSKMRRRVIARPVGSSVRLKCVASGHPRPDITWMKDDQALTRPEAAEPRKKKWTLSLKNLRPEDSGKYTCRVSNRAGAINATYKVDVIQRTRSKPVLTGTHPVNTTVDFGGTTSFQCKVRSDVKPVIQWLKRVEYGAEGRHNSTIDVGGQKFVVLPTGDVWSRPDGSYLNKLLITRARQDDAGMYICLGANTMGYSFRSAFLTVLPDPKPQGPPVASSSSATSLPWPVVIGIPAGAVFILGTLLLWLCQAQKKPCTPAPAPPLPGHRPPGTARDRSGDKDLPSLAALSAGPGVGLCEEHGSPAAPQHLLGPGPVAGPKLYPKLYTDIHTHTHTHSHTHSHVEGKVHQHIHYQC

SEQ ID NO: 1387 - protein, 350 aa, Homo sapiens
NPCKQVSQIKYAANNGVQMMTFDSEVELMKVARAHPKAKLVLRIATDDSKAVCRLSVKFGATLRTSRLLLERAKELNIDVVGVSFHVGSGCTDPETFVQAISDARCVFDMGAEVGFSMYLLDIGGGFPGSEDVKLKFEEITGVINPALDKYFPSDSGVRIIAEPGRYYVASAFTLAVNIIAKKIVLKEQTGSDDEDESSEQTFMYYVNDGVYGSFNCILYDHAHVKPLLQKRPKPDEKYYSSSIWGPTCDGLDRIVERCDLPEMHVGDWMLFENMGAYTVAAASTFNGFQRPTIYYVMSGPAWQLMQQFQNPDFPPEVEEQDASTLPVSCAWESGMKRHRAACASASINV

SEQ ID NO: 1388 - protein, 396 aa, Homo sapiens
MQLKCNDSKAIVKTLAATGTGFDCASKTEIQLVQSLGVPPERIIYANPCKQVSQIKYAANNGVQMMTFDSEVELMKVARAHPKAKLVLRIATDDSKAVCRLSVKFGATLRTSRLLLERAKELNIDVVGVSFHVGSGCTDPETFVQAISDARCVFDMGAEVGFSMYLLDIGGGFPGSEDVKLKFEEITGVINPALDKYFPSDSGVRIIAEPGRYYVASAFTLAVNIIAKKIVLKEQTGSDDEDESSEQTFMYYVNDGVYGSFNCILYDHAHVKPLLQKRPKPDEKYYSSSIWGPTCDGLDRIVERCDLPEMHVGDWMLFENMGAYTVAAASTFNGFQRPTIYYVMSGPAWQLMQQFQNPDFPPEVEEQDASTLPVSCAWESGMKRHRAACASASINV

SEQ ID NO: 1389 - protein, 216 aa, Homo sapiens
MRPRSGPTRNPRLRAFAGVPTRGRTRGQSRRCAAEASAGPERDARPGAPAAGTMGAAHSASEEVRELEGKTGFSSDQIEQLHRRFKQLSGDQPTIRKENFNNVPDLELNPIRSKIVRAFFDNRNLRKGPSGLADEINFEDFLTIMSYFRPIDTTMDEEQVELSRKEKLRFLFHMYDSDSDGRITLEEYRNVKWSRSCCRETLTSRRSPLAPSPTGP

SEQ ID NO: 1390 - protein, 172 aa, Homo sapiens
MPGSRKLEYGGQTWHEHCFLCSGCEQPLGSRSFVPDKGAHYCVPCYENKFAPRCARCSKTLTQGGVTYRDQPWHRECLVCTGCQTPLAGQQFTSRDEDPYCVACFGELFAPKCSSCKRPIVGLGGGKYVSFEDRHWHHNCFSCARCSTSLVGQGFVPDGDQVLCQGCSQAGP

SEQ ID NO: 1391 - protein, 280 aa, Homo sapiens
MSESFDCAKCNESLYGRKYIQTDSGPYCVPCYDNTFANTCAECQQLIGHDSRELFYEDRHFHEGCFRCCRCQRSLADEPFTCQDSELLCNDCYCSAFSSQCSACGETVMPGSRKLEYGGQTWHEHCFLCSGCEQPLGSRSFVPDKGAHYCVPCYENKFAPRCARCSKTLTQGGVTYRDQPWHRECLVCTGCQTPLAGQQFTSRDEDPYCVACFGELFAPKCSSCKRPIVGLGGGKYVSFEDRHWHHNCFSCARCSTSLVGQGFVPDGDQVLCQGCSQAGP

SEQ ID NO: 1392 - protein, 133 aa, Homo sapiens [sequence omitted]

SEQ ID NO: 1393 - protein, 112 aa, Homo sapiens; identical to SEQ ID NO: 603

SEQ ID NO: 1394 - protein, 141 aa, Homo sapiens
MWVLGIAATFCGLFLLPGFALQIQCYQCEEFQLNNDCSSPEFIVNCTVNVQDMCQKEVMEQSAGIMYRKSCASSAACLIASAGYQSFCSPGKLNSVCISCCNTPLCNGPRPKKRGSSASALRPGLRTTILFLKLALFSAHC

SEQ ID NO: 1395 - protein, 165 aa, Homo sapiens
MWVLGIAATFCGLFLLPGFALQIQCYQCEEFQLNNDCSSPEFIVNCTVNVQDMCQKEVMEQSAGIMYRKSCASSAACLIASAGYQSFCSPGKLNSVCISCCNTPLCNGPRPKKRGSSASALRPGLRTTILFLKLASSRHTAELKEMPPPPALFFQPSPPTPHLPE

SEQ ID NO: 1396 - protein, 164 aa, Homo sapiens [sequence omitted]

SEQ ID NO: 1397 - protein, 157 aa, Homo sapiens
MQAPRAAPAAPLSYDRRLRGSIAATFCGLFLLPGFALQIQCYQCEEFQLNNDCSSPEFIVNCTVNVQDMCQKEVMEQSAGIMYRKSCASSAACLIASAGYQSFCSPGKLNSVCISCCNTPLCNGPRPKKRGSSASALRPGLRTTILFLKLALFSAHC

SEQ ID NO: 1398 - DNA, 50 bp, Homo sapiens
gacatctttgcatatcatgtcagagctataacatcattgtggagaagctc

SEQ ID NO: 1399 - DNA, 50 bp, Homo sapiens
gtcatgaaaatcaacaccgaggtgcggagcttcggacctgtgtcccgcag

SEQ ID NO: 1400 - DNA, 50 bp, Homo sapiens
atgcgggcatgtacatctgccttggcgccaacaccatgggctacagcttc

SEQ ID NO: 1401 - DNA, 50 bp, Homo sapiens
gggtctggggtgctctcctggtctttgtgtcggcgttcccctccctacct

SEQ ID NO: 1402 - DNA, 50 bp, Homo sapiens
tgaagagtgtgaggaaaacctatgtttgccgcttaagctttcagctcagc

SEQ ID NO: 1403 - DNA, 50 bp, Homo sapiens
gcagaaactttgcagtaacaccttcagtgagttcaaggctaggatccctg

SEQ ID NO: 1404 - DNA, 50 bp, Homo sapiens
ccaaggctcgtctgcgcaccttgtgtcttgtagggtatggtatgtgggac

SEQ ID NO: 1405 - DNA, 50 bp, Homo sapiens
cacagagccaggatgttcttctgacctcagtatctactccagctccagct

SEQ ID NO: 1406 - DNA, 50 bp, Homo sapiens
tggcatgctggaacatggactctagctagcaagaagggctcaaggaggtg

SEQ ID NO: 1407 - DNA, 50 bp, Homo sapiens
aaaagcatgagtttctgaccagcgttctggacgcgctgtccacggacatg

SEQ ID NO: 1408 - DNA, 50 bp, Homo sapiens
atgttcttaggaggcaagccaggagaagccgggtctgacttttcagctca

SEQ ID NO: 1409 - DNA, 50 bp, Homo sapiens
tcctccagacccaaagccacaacccatcgcaagtcaagaacactttccag

SEQ ID NO: 1410 - DNA, 50 bp, Homo sapiens
aactctggcaccttgggctgtggaaggctctggaaagtccttcaaagctg

SEQ ID NO: 1411 - DNA, 50 bp, Homo sapiens
gctgcaatctaagtttcggaatacttataccactccagaaataatcctcg

SEQ ID NO: 1412 - DNA, 50 bp, Homo sapiens
ttcagaactgttaacatcgctgacgggaagtggcatcgggtagcaatcag

SEQ ID NO: 1413 - DNA, 50 bp, Homo sapiens
ctcaaaatgaaactccctctcgcagagcacaattccaattcgctctaaaa

SEQ ID NO: 1414 - DNA, 50 bp, Homo sapiens
aaggaagcaggaccagtggatgtgaggcgtggtcgaagaacaacagaaag

SEQ ID NO: 1415 - DNA, 50 bp, Homo sapiens
acaggggccagatggtgacccatgacccagcctaaaaggcagccagaggg

SEQ ID NO: 1416 - DNA, 50 bp, Homo sapiens
gaggcccctgggtgggaatggggacaggaattgacagtggaaggggttct

SEQ ID NO: 1417 - DNA, 50 bp, Homo sapiens
tgactccctacatactccaggactagcttaggtcccaacccaatagttcc

SEQ ID NO: 1418 - DNA, 50 bp, Homo sapiens
tggtccccatgtgattctccgaggatcctgagggtcgtggtttatggaga

SEQ ID NO: 1419 - DNA, 50 bp, Homo sapiens
acgtgatggttggaacgcgtaccttagagcttccagttccgtcttaggac

SEQ ID NO: 1420 - DNA, 50 bp, Homo sapiens
atccccactgaacccagtgctttcaccagccatattagctcccactcacc

SEQ ID NO: 1421 - DNA, 50 bp, Homo sapiens
caccgcatgctgccaatctgatggtggagacagaacagcagtcccggatg

SEQ ID NO: 1422 - DNA, 50 bp, Homo sapiens
tttccacactcagtgccacgaagtgcagctctaagctggggatttctgtg

SEQ ID NO: 1423 - DNA, 50 bp, Homo sapiens
acccagctccatgtgcgttctcagggaatggacgccagtgtactgccaat

SEQ ID NO: 1424 - DNA, 50 bp, Homo sapiens; identical to SEQ ID NO: 1331

SEQ ID NO: 1425 - DNA, 50 bp, Homo sapiens; identical to SEQ ID NO: 1332

SEQ ID NO: 1426 - DNA, 50 bp, Homo sapiens; identical to SEQ ID NO: 1334

SEQ ID NO: 1427 - DNA, 50 bp, Homo sapiens; identical to SEQ ID NO: 1333

SEQ ID NO: 1428 - DNA, 50 bp, Homo sapiens; identical to SEQ ID NO: 1338

SEQ ID NO: 1429 - DNA, 50 bp, Homo sapiens
cctggtgggagcccatgagaagcgagttctctgtgcaacggacttagtaa

SEQ ID NO: 1430 - DNA, 50 bp, Homo sapiens
gctccctggagcatcagcatcatattctggggtggagtctatctggttct

SEQ ID NO: 1431 - DNA, 50 bp, Homo sapiens; identical to SEQ ID NO: 1339

SEQ ID NO: 1432 - DNA, 50 bp, Homo sapiens
tttaacacaggattgggacaggattcagagggacactgtggcccttctac

SEQ ID NO: 1433 - DNA, 50 bp, Homo sapiens
ccatccacatttatggaaacacttgctgtatatctggtgatttacgtgtg

SEQ ID NO: 1434 - DNA, 50 bp, Homo sapiens
cctttcaccactgtgtgcaagcgaatacacgcggaacaatcctagtgaat

SEQ ID NO: 1435 - DNA, 50 bp, Homo sapiens
tttgctagaaatctggtgtggtgcaggagcgactccaggattcactctgt

SEQ ID NO: 1436 - DNA, 50 bp, Homo sapiens
tccgtgaccctcagagatcctttgccctgggaatccagtggattgtagtt

SEQ ID NO: 1437 - DNA, 50 bp, Homo sapiens
cccatggtggccagagtgtcaggtctcatcgtgacgctcttgtcctcctc

SEQ ID NO: 1438 - DNA, 50 bp, Homo sapiens
ggggctgtgcccagtccccctgtcagaccctcaatgactgaggcctgggg

SEQ ID NO: 1439 - DNA, 50 bp, Homo sapiens
actttgcactggaacttacaacacccgagcaaggacgcgactctcccgac

SEQ ID NO: 1440 - DNA, 50 bp, Homo sapiens
gcctactgattcatccacatacaattctcagcgtatatccaaatgcagtc

SEQ ID NO: 1441 - DNA, 50 bp, Homo sapiens
ggacctctaagtctacaggtggtcaaaatgctgtatccacccaattccac

SEQ ID NO: 1442 - protein, 18 aa, Artificial
  Synthetic peptide
EIPLMPTVERSQEARCYP

SEQ ID NO: 1443 - protein, 19 aa, Artificial
  Synthetic peptide
NWRKNSVKQNQDTTPSQGA

SEQ ID NO: 1444 - protein, 11 aa, Artificial
  Synthetic peptide
YDGPPQMYFAY

SEQ ID NO: 1445 - protein, 4 aa, Artificial
  Synthetic peptide
PTPG

SEQ ID NO: 1446 - protein, 53 aa, Artificial
  Synthetic peptide
SFSHTSSPDLTNQLNHIFLEVKSFSFSTQPLFLWNWRKNSVKQNQDTTPSQGA

SEQ ID NO: 1447 - protein, 7 aa, Artificial
  Synthetic peptide
KSPVSEY

SEQ ID NO: 1448 - protein, 6 aa, Artificial
  Synthetic peptide
TGEKTQ

SEQ ID NO: 1449 - protein, 25 aa, Artificial
  Synthetic peptide
VRKTPSHDLWKQKHLCQSSWNPLLH

SEQ ID NO: 1450 - protein, 28 aa, Artificial
  Synthetic peptide
MHHSDWGNIMWIFQMSPLQNFRKEERNQ

SEQ ID NO: 1451 - protein, 51 aa, Artificial
  Synthetic peptide
GMGWGGLCCTGSGGPRRLSPCTQPLCTEHGTEAIFVAAVGIRPSHHAAAQS

SEQ ID NO: 1452 - protein, 50 aa, Artificial
  Synthetic peptide
SEHLCPEGQGEVEGNTGLGVMDRGFPGTHLRSSQFWALQAWESVHYWESV

SEQ ID NO: 1453 - protein, 17 aa, Artificial
  Synthetic peptide
CESQGGCAQSPCQTLND

SEQ ID NO: 1454 - protein, 11 aa, Artificial
  Synthetic peptide
GEPGVGAEGMR

SEQ ID NO: 1455 - protein, 25 aa, Artificial
  Synthetic peptide
FQLPEVHHSLNVLNRKFQKQTVHNL

SEQ ID NO: 1456 - protein, 7 aa, Artificial
  Synthetic peptide
TIKHKAF

SEQ ID NO: 1457 - protein, 7 aa, Artificial
  Synthetic peptide
TIKHKAF

SEQ ID NO: 1458 - protein, 73 aa, Artificial
  Synthetic peptide
SGAAAYRPCPPLDPGKGPPCLPLVIGAIVGLPRCTETVAVSLRIFPLVLAMPLQGNALQLVRESPSFWFSYSL

SEQ ID NO: 1459 - protein, 13 aa, Artificial
  Synthetic peptide
QHSCTNGNSTMCP

SEQ ID NO: 1460 - protein, 7 aa, Artificial
  Synthetic peptide
ASCPKAT

SEQ ID NO: 1461 - protein, 9 aa, Artificial
  Synthetic peptide
EEENEFRRL

SEQ ID NO: 1462 - protein, 30 aa, Artificial
  Synthetic peptide
MGTSPMADPVPAGRQHGSGLDPTTRLSPLC

SEQ ID NO: 1463 - protein, 5 aa, Artificial
  Synthetic peptide
MWTAR

SEQ ID NO: 1464 - protein, 114 aa, Artificial
  Synthetic peptide
SGAAAYRPCPPLDPGKGPPCLPLVIGAIVGLPRCTETVAVSLRIFPLVLAMHCREMHFNLSEKAPPSGFHIRCNFLYIPQQHSCTNGNSTVSWGRVCACPELSLQHPEAELCRS

SEQ ID NO: 1465 - protein, 384 aa, Artificial
  Synthetic peptide
NWLVRHPDCINVPDWRGAICSGCYAQMYIQAYKTSNLRMKIIKNDFPSHPLYLEGALTRSTHYQQYQPVVTLQKGYTIHWDQTAPAELAIWLINFNKGDWIRVGLCYPRGTTFSILSDVHNRLLKQTSKTGVFVRTLQMDKVEQSYPGRSHYYWDEDSGLLFLKLKAQNEREKFAFCSMKGCERIKIKALIPKNAGVSDCTATAYPKFTERAVVDVPMPKKLFGSQLKTKDHFLEVKMESSKQHFFHLWNDFAYIEVDGKKYPSSEDGIQVVVIDGNQGRVVSHTSFRNSILQGIPWQLFNYVATIPDNSIVLMASKGRYVSRGPWTRVLEKLGADRGLKLKEQMAFVGFKGSFRPIWVTLDTEDHKAKIFQVVPIPVVKKKKL

SEQ ID NO: 1466 - protein, 91 aa, Artificial
  Synthetic peptide
MYLHIGEEIDGVDMRAEVGLLSRNIIVMGEMEDKCYPYRNHICNFFDFDTFGGHIKFALGFKAAHLEGTELKHMGQQLVGQYPIHFHLAGD

SEQ ID NO: 1467 - protein, 384 aa, Artificial; identical to SEQ ID NO: 1465
  Synthetic peptide

SEQ ID NO: 1468 - protein, 199 aa, Artificial
  Synthetic peptide
MDGVNLSTEVVYKKGQDYRFACYDRGRACRSYRVRFLCGKPVRPKLTVTIDTNVNSTILNLEDNVQSWKPGDTLVIASTDYSMYQAEEFQVLPCRSCAPNQVKVAGKPMYLHIGEEIDGVDMRAEVGLLSRNIIVMGEMEDKCYPYRNHICNFFDFDTFGGHIKFALGFKAAHLEGTELKHMGQQLVGQYPIHFHLAGD

SEQ ID NO: 1469 - protein, 348 aa, Artificial
  Synthetic peptide
MGAAGRQDFLFKAMLTISWLTLTCFPGATSTVAAGCPDQSPELQPWNPGHDQDHHVHIGQGKTLLLTSSATVYSIHISEGGKLVIKDHDEPIVLRTRHILIDNGGELHAGSALCPFQGNFTIILYGRADEGIQPDPYYGLKYIGVGKGGALELHGQKKLSWTFLNKTLHPGGMAEGGYFFERSWGHRGVIVHVIDPKSGTVIHSDRFDTYRSKKESERLVQYLNAVPDGRILSVAVNDEGSRNLDDMARKAMTKLGSKHFLHLGFRHPWSFLTVKGNPSSSVEDHIEYHGHRGSAAARVFKLFQTEHGEYFNVSLSSEWVQDVEWTEWFDHDKVSQTKGGEKISDLWK

SEQ ID NO: 1470 - protein, 8 aa, Artificial
  Synthetic peptide
KQRTISWR

SEQ ID NO: 1471 - protein, 348 aa, Artificial; identical to SEQ ID NO: 1469
  Synthetic peptide

SEQ ID NO: 1472 - protein, 159 aa, Artificial
  Synthetic peptide
NWLVRHPDCINVPDWRGAICSGCYAQMYIQAYKTSNLRMKIIKNDFPSHPLYLEGALTRSTHYQQYQPVVTLQKGYTIHWDQTAPAELAIWLINFNKGDWIRVGLCYPRGTTFSILSDVHNRLLKQTSKTGVFVRTLQMDKVEQSYPGRSHYYWDEDSG

SEQ ID NO: 1473 - protein, 8 aa, Artificial
  Synthetic peptide
GEEFQTIW

SEQ ID NO: 1474 - protein, 9 aa, Artificial
  Synthetic peptide
MSDKLPYKV

SEQ ID NO: 1475 - protein, 81 aa, Artificial
  Synthetic peptide
CEYICSSLAQAASPNPQGQRQDFSVPLRFKYTDPQPWTSRLSVTFCPRKTWADQVLTKNRRGGAASVLGGSGSTPYDGRNR

SEQ ID NO: 1476 - protein, 44 aa, Artificial
  Synthetic peptide
GKWLPGASASYSGVESIWFSPKSQEDIFFPSLCSMGTRKSQILS

SEQ ID NO: 1477 - protein, 47 aa, Artificial
  Synthetic peptide
MLRPRCLLRRTAHPPHSAPAPAPARSKCLGSWSNVLIRESSVWSLRL

SEQ ID NO: 1478 - protein, 6 aa, Artificial
  Synthetic peptide
HGGSRL

SEQ ID NO: 1479 - protein, 27 aa, Artificial
  Synthetic peptide
MSDLFIGFLVCSLSPLGTGTRCSCSPG

SEQ ID NO: 1480 - protein, 20 aa, Artificial
  Synthetic peptide
VPIGWVLSPSPTSLRAPLPG

SEQ ID NO: 1481 - protein, 31 aa, Artificial
  Synthetic peptide
ERQDLTMLSRLVLNSWPQMILPPQPPKVLEL

SEQ ID NO: 1482 - protein, 5 aa, Artificial
  Synthetic peptide
DWTRP

SEQ ID NO: 1483 - protein, 22 aa, Artificial
  Synthetic peptide
LLLSSQLWPPSASRLECWPGWL

SEQ ID NO: 1484 - protein, 70 aa, Artificial
  Synthetic peptide
KWIHEALASHFQVESGSQRRARKKFSFPTCVQGAHANPKFSPEPSQFTSADSFPLVFLFFVVFCFLISHV

SEQ ID NO: 1485 - protein, 42 aa, Artificial
  Synthetic peptide
REYFHMTSGCWGSVLLPTYGIVRPGLCLWPSLHYILYQGLDI

SEQ ID NO: 1486 - protein, 13 aa, Artificial
  Synthetic peptide
GKPSLLLPHSLLG

SEQ ID NO: 1487 - protein, 80 aa, Artificial
  Synthetic peptide
GARLPRHATPCWCPDPPPGPGVPPTGWGPTLPSRAVLARSSAEGGQPRGTVSTAPGMGLGCSPGLCVGVPLPTSFPLALA

SEQ ID NO: 1488 - protein, 221 aa, Artificial
  Synthetic peptide
TQNRQGHLWPPRPRPLACRGPWSSASQPALSSSWAPCSCGFARPRRSRAPPRLPLPCLGTARRGRPATAAETRTFPRWPPSALALVWGCVRSMGLRQPPSTYWAQAQLLALSCTPNSTQTSTHTHTHTLTHTHTWRARSTSTSTISARRHRICSGHGGAGQTGRLGGWRTELQTKAGDPWRGGMASTPGSLCVRHSPWTHTHRHTHYLDACMHTHARTRAP

SEQ ID NO: 1489 - protein, 37 aa, Artificial
  Synthetic peptide
SHTQEWEESLSQPRIPHGSENHRKDTEQGEHQLTGEK

SEQ ID NO: 1490 - protein, 103 aa, Artificial
  Synthetic peptide
MHKKGSPILGSHTARVAGTSPPALPLLAQLPDASAEPHGPRHALRRPQQSPAPAGGAAAPAPGGRQPARSRWVPAPWGPRAGRGWGGRPAPTAPLNQRVYSSL

SEQ ID NO: 1491 - protein, 29 aa, Artificial
  Synthetic peptide
MKSLTATSSMKVLLPRTFWTRKLMKFLLL

SEQ ID NO: 1492 - protein, 44 aa, Artificial
  Synthetic peptide
MAEKALLCPSSAGLGTWPWVLNSAWPVLPLAVDQGVDWRPRGPV

SEQ ID NO: 1493 - protein, 76 aa, Artificial
  Synthetic peptide
VEELLSGNPHIEKESARSIADGAMMEAASVCMGQMEPDQVYEGITFEDFLKIWQGIDIETKMHVRFLNMETMALCH

SEQ ID NO: 1494 - protein, 130 aa, Artificial
  Synthetic peptide
GGGGRADWRPKGRWGRGLAPAAGWGAGVRGPGGAGPRSLPRGGVGAALPLAHTVRLQSAASPAARSAPAWPGPQELFYEDRHFHEGCFRCCRCQRSLADEPFTCQDSELLCNDCYCSAFSSQCSACGETV

SEQ ID NO: 1495 - protein, 34 aa, Artificial
  Synthetic peptide
MNPSPARTVSCSAMTATAVRFPRSAPLVGRLSCL

SEQ ID NO: 1496 - protein, 99 aa, Artificial
  Synthetic peptide
VRWATLELYLIGYYYCSFSQACSKKPSPPLRAVEAGTREWLWVRVVSGGNFLCSGFGLTQAGTQILPYRLHDCGQITFSKCNCKTGINNTNLVGLLGSL

SEQ ID NO: 1497 - protein, 62 aa, Artificial
  Synthetic peptide
DVLTAWPSIYRRQVKVLREDEITILPWHLQWSREKATKLLRPTLPSYNNHGWEELRVGKSIV

SEQ ID NO: 1498 - protein, 10 aa, Artificial
  Synthetic peptide
MEKLQLRNVK

SEQ ID NO: 1499 - protein, 11 aa, Artificial
  Synthetic peptide
AHILITFPLPS

SEQ ID NO: 1500 - protein, 23 aa, Artificial
  Synthetic peptide
DAMVVSSRPKATTHRKSRTLSRR

SEQ ID NO: 1501 - protein, 6 aa, Artificial
  Synthetic peptide
RSKRNL

SEQ ID NO: 1502 - protein, 13 aa, Artificial
  Synthetic peptide
LLWLRGKVSFYCF

SEQ ID NO: 1503 - protein, 8 aa, Artificial
  Synthetic peptide
GKQGMRAH

SEQ ID NO: 1504 - protein, 25 aa, Artificial
  Synthetic peptide
GEKRHHKQLRDQEVDPLEMRRHSAG

SEQ ID NO: 1505 - protein, 8 aa, Artificial
  Synthetic peptide
RGSLGSAQ

SEQ ID NO: 1506 - protein, 28 aa, Artificial
  Synthetic peptide
GSMKSISEFLVLLSELKWMMLSKFVLKI

SEQ ID NO: 1507 - protein, 12 aa, Artificial
  Synthetic peptide
DVPHPWVWKMER

SEQ ID NO: 1508 - protein, 16 aa, Artificial
  Synthetic peptide
SKSEYYFCSSVFHSCG

SEQ ID NO: 1509 - protein, 33 aa, Artificial
  Synthetic peptide
VTVEGPLEDPSELEVDIDYFMKHSKDHTSTPNP

SEQ ID NO: 1510 - protein, 73 aa, Artificial
  Synthetic peptide
MWTFVTQLLVTLVLLSFFLVSCQNVMHIVRGSLCFVLKHIHQELDKELGESEGLSDDEETISTRVVRRRVFLK

SEQ ID NO: 1511 - protein, 46 aa, Artificial
  Synthetic peptide
VTVEGPLEDPSELEVELRGSGLQPDLIEGRKGAQIVKRASLKRGKQ

SEQ ID NO: 1512 - protein, 14 aa, Artificial
  Synthetic peptide
EVTVEGPLEDPSEL

SEQ ID NO: 1513 - protein, 57 aa, Artificial
  Synthetic peptide
VTVEGPLEDPSELEVDIDYFMKHSKVELRGSGLQPDLIEGRKGAQIVKRASLKRGKQ

SEQ ID NO: 1514 - protein, 25 aa, Artificial
  Synthetic peptide
VTVEGPLEDPSELEVDIDYFMKHSK

SEQ ID NO: 1515 - protein, 22 aa, Artificial
  Synthetic peptide
VTVEGPLEDPSELEDHTSTPNP

SEQ ID NO: 1516 - protein, 21 aa, Artificial
  Synthetic peptide
VGAECSPLCWGEAGGLEAKRW

SEQ ID NO: 1517 - protein, 32 aa, Artificial
  Synthetic peptide
VELRGSGLQPDLIEGRKGAQIVKRASLKRGKQ

SEQ ID NO: 1518 - protein, 8 aa, Artificial
  Synthetic peptide
DHTSTPNP

SEQ ID NO: 1519 - protein, 32 aa, Artificial; identical to SEQ ID NO: 1517
  Synthetic peptide

SEQ ID NO: 1520 - protein, 17 aa, Artificial
  Synthetic peptide
GPRAPRLAPPSGLCPGQ

SEQ ID NO: 1521 - protein, 25 aa, Artificial
  Synthetic peptide
VSMMIINSQTIMVVNYSSSFITLML

SEQ ID NO: 1522 - protein, 15 aa, Artificial
  Synthetic peptide
MCCNLSFGILIPLQK

SEQ ID NO: 1523 - protein, 42 aa, Artificial
  Synthetic peptide
VSFSFSLFYKKVIKFACDKRFVGRHDERKVVKLSLPLYLIYE

SEQ ID NO: 1524 - protein, 13 aa, Artificial
  Synthetic peptide
VRSTRPEKVFVFQ

SEQ ID NO: 1525 - protein, 5 aa, Artificial
  Synthetic peptide
GKAGV

SEQ ID NO: 1526 - protein, 31 aa, Artificial
  Synthetic peptide
PGLERGADKFPVVGGSSLFLALDLTLRPPVG

SEQ ID NO: 1527 - protein, 17 aa, Artificial
  Synthetic peptide
VWAATGRRVARVGMLSL

SEQ ID NO: 1528 - protein, 12 aa, Artificial
  Synthetic peptide
LWTSLLALTIPS

SEQ ID NO: 1529 - protein, 17 aa, Artificial
  Synthetic peptide
VWAATGRRVARVGMLSL

SEQ ID NO: 1530 - protein, 26 aa, Artificial
  Synthetic peptide
MLARAARGTGALLLRGSLLASGRAPR

SEQ ID NO: 1531 - protein, 88 aa, Artificial
  Synthetic peptide
NGDAAASLTVAEQYVSAFSKLAKDSNTILLPSNPGDVTSMVAQAMGVYGALTKAPVPGTPDSLSSGSSRDVQGTDASLDEELDRVKMS

SEQ ID NO: 1532 - protein, 26 aa, Artificial
  Synthetic peptide
MLARAARGTGALLLRGSLLASGRAPR

SEQ ID NO: 1533 - protein, 4 aa, Artificial
  Synthetic peptide
VRAL

SEQ ID NO: 1534 - protein, 26 aa, Artificial
  Synthetic peptide
MLARAARGTGALLLRGSLLASGRAPR

SEQ ID NO: 1535 - protein, 22 aa, Artificial
  Synthetic peptide
VRGPWVGMGTGIDSGRGSLIYA

SEQ ID NO: 1536 - protein, 26 aa, Artificial
  Synthetic peptide
MLARAARGTGALLLRGSLLASGRAPR

SEQ ID NO: 1537 - protein, 88 aa, Artificial; identical to SEQ ID NO: 1531
  Synthetic peptide

SEQ ID NO: 1538 - protein, 41 aa, Artificial
  Synthetic peptide
AGQERVEAEGGARHGPLKIGAGAGSLGYFDFMGQASSVPSL

SEQ ID NO: 1539 - protein, 26 aa, Artificial
  Synthetic peptide
MLARAARGTGALLLRGSLLASGRAPR

SEQ ID NO: 1540 - protein, 45 aa, Artificial
  Synthetic peptide
AMGVYGALTKAPVPGTPDSLSSGSSRDVQGTDASLDEELDRVKMS

SEQ ID NO: 1541 - protein, 26 aa, Artificial
  Synthetic peptide
MLARAARGTGALLLRGSLLASGRAPR

SEQ ID NO: 1542 - protein, 22 aa, Artificial
  Synthetic peptide
VRGPWVGMGTGIDSGRGSLIYA

SEQ ID NO: 1543 - protein, 41 aa, Artificial; identical to SEQ ID NO: 1538
  Synthetic peptide

SEQ ID NO: 1544 - protein, 26 aa, Artificial
  Synthetic peptide
MLARAARGTGALLLRGSLLASGRAPR

SEQ ID NO: 1545 - protein, 35 aa, Artificial
  Synthetic peptide
VSRSEPELGFEDTNLTLLIFSEGQDQSQALLSVGP

SEQ ID NO: 1546 - protein, 26 aa, Artificial
  Synthetic peptide
MLARAARGTGALLLRGSLLASGRAPR

SEQ ID NO: 1547 - protein, 26 aa, Artificial
  Synthetic peptide
GAKEGWEKGLRAPVPGGSRLPSCYDG

SEQ ID NO: 1548 - protein, 26 aa, Artificial
  Synthetic peptide
MLARAARGTGALLLRGSLLASGRAPR

SEQ ID NO: 1549 - protein, 88 aa, Artificial; identical to SEQ ID NO: 1531
  Synthetic peptide

SEQ ID NO: 1550 - protein, 26 aa, Artificial
  Synthetic peptide
MLARAARGTGALLLRGSLLASGRAPR

SEQ ID NO: 1551 - protein, 26 aa, Artificial
  Synthetic peptide
MLARAARGTGALLLRGSLLASGRAPR

SEQ ID NO: 1552 - protein, 19 aa, Artificial
  Synthetic peptide
SRLTLQWEQQRCPGYRCKS

SEQ ID NO: 1553 - protein, 41 aa, Artificial
  Synthetic peptide
VRNLFCPPWASQMTNPSRHAMSGGLPLGLPALLAPDSVGQT

SEQ ID NO: 1554 - protein, 26 aa, Artificial
  Synthetic peptide
MLARAARGTGALLLRGSLLASGRAPR

SEQ ID NO: 1555 - protein, 11 aa, Artificial
  Synthetic peptide
ELLLFWACSMC

SEQ ID NO: 1556 - protein, 26 aa, Artificial
  Synthetic peptide
MLARAARGTGALLLRGSLLASGRAPR

SEQ ID NO: 1557 - protein, 17 aa, Artificial
  Synthetic peptide
GTGVPECQHCGCHQPSC

SEQ ID NO: 1558 - protein, 110 aa, Artificial
  Synthetic peptide
MWVLGIAATFCGLFLLPGFALQIQCYQCEEFQLNNDCSSPEFIVNCTVNVQDMCQKEVMEQSAGIMYRKSCASSAACLIASAGSPCRGLAPGREEQRALHKAGAVGGGVR

SEQ ID NO: 1559 - protein, 139 aa, Artificial
  Synthetic peptide
SPCRGLAPGREEQRALHKAGAVGGGVRMYAQALLVVGVLQRQAAAQHLHEHPPKLLRGHRVQERVDDRAEVEKRLREGEEDHVRPEVGPRPVVLGFGRSHDPPNLVGHPAYGQCHNNQPWADTSRRERQRKEKHSMRTQ

SEQ ID NO: 1560 - protein, 29 aa, Artificial
  Synthetic peptide
SHCVTRLECSGTISAHCNLCLPGSNDHPT

SEQ ID NO: 1561 - protein, 5 aa, Artificial
  Synthetic peptide
MWVLG

SEQ ID NO: 1562 - protein, 21 aa, Artificial
  Synthetic peptide
DTKRTNTLLFEMRHFAKQLTT

SEQ ID NO: 1563 - protein, 27 aa, Artificial
  Synthetic peptide
DRVSLCHEAGVQWNNFSTLQPLPPRLK

SEQ ID NO: 1564 - protein, 5 aa, Artificial
  Synthetic peptide
MWVLG

SEQ ID NO: 1565 - protein, 7 aa, Artificial
  Synthetic peptide
VRDPYRK

SEQ ID NO: 1566 - protein, 11 aa, Artificial
  Synthetic peptide
VRSSKPSFCLS

SEQ ID NO: 1567 - protein, 11 aa, Artificial
  Synthetic peptide
GNTEVLVLIQM

SEQ ID NO: 1568 - protein, 51 aa, Artificial
  Synthetic peptide
ALGVRQLVGGGHSSRFSHLVVAGLPHACHRKSGSSSQVLCPEPSALLSVAG

SEQ ID NO: 1569 - protein, 24 aa, Artificial
  Synthetic peptide
ELGFPSSTGRDESLEHCRCQGLHK

SEQ ID NO: 1570 - protein, 11 aa, Artificial
  Synthetic peptide
TTGVSTPAPGV

SEQ ID NO: 1571 - protein, 15 aa, Artificial
  Synthetic peptide
VRPCLPVPLLLCWPL

SEQ ID NO: 1572 - protein, 11 aa, Artificial
  Synthetic peptide
TTGVSTPAPGV

SEQ ID NO: 1573 - protein, 21 aa, Artificial
  Synthetic peptide
WCWWRRRGAAKAGPSGCRRWG

SEQ ID NO: 1574 - protein, 21 aa, Artificial
  Synthetic peptide
GTVQCEEAMVSCTVCSLHKGM

SEQ ID NO: 1575 - protein, 21 aa, Artificial
  Synthetic peptide
GTVQCEEAMVSCTVCSLHKGM

SEQ ID NO: 1576 - DNA, 1536 bp, Homo sapiens
gtgacgcgaggctctgcggagaccaggagtcagactgtaggacgacctcgggtcccacgtgtccccggtactcgccggccggagcccccggcttcccggggccgggggaccttagcggcacccacacacagcctactttccaagcggagccatgtctggtaacggcaatgcggctgcaacggcggaagaaaacagcccaaagatgagagtgattcgcgtgggtacccgcaagagccagcttgctcgcatacagacggacagtgtggtggcaacattgaaagcctcgtaccctggcctgcagtttgaaatcattgctatgtccaccacaggggacaagattcttgatactgcactctctaagattggagagaaaagcctgtttaccaaggagcttgaacatgccctggagaagaatgaagtggacctggttgttcactccttgaaggacctgcccactgtgcttcctcctggcttcaccatcggagccatctgcaagcgggaaaaccctcatgatgctgttgtctttcacccaaaatttgttgggaagaccctagaaaccctgccagagaagagtgtggtgggaaccagctccctgcgaagagcagcccagctgcagagaaagttcccgcatctggagttcaggagtattcggggaaacctcaacacccggcttcggaagctggacgagcagcaggagttcagtgccatcatcctggcaacagctggcctgcagcgcatgggctggcacaaccgggtggggcagatcctgcaccctgaggaatgcatgtatgctgtgggccagggggccttgggcgtggaagtgcgagccaaggaccaggacatcttggatctggtgggtgtgctgcacgatcccgagactctgcttcgctgcatcgctgaaagggccttcctgaggcacctggaaggaggctgcagtgtgccagtagccgtgcatacagctatgaaggatgggcaactgtacctgactggaggagtctggagtctagacggctcagatagcatacaagagaccatgcaggctaccatccatgtccctgcccagcatgaagatggccctgaggatgacccacagttggtaggcatcactgctcgtaacattccacgagggccccagttggctgcccagaacttgggcatcagcctggccaacttgttgctgagcaaaggagccaaaaacatcctggatgttgcacggcagcttaacgatgcccattaactggtttgtggggcacagatgcctgggttgctgctgtccagtgcctacatcccgggcctcagtgccccattctcactgctatctggggagtgattaccccgggagactgaactgcagggttcaagccttccagggatttgcctcaccttggggccttgatgactgccttgcctcctcagtatgtgggggcttcatctctttagagaagtccaagcaacagcctttgaatgtaaccaatcctactaataaaccagttctgaaggtaaaaaaaaaaaaaaaaaaaaaaaaaaaaaaaaaaa

SEQ ID NO: 1577 - DNA, 1331 bp, Homo sapiens
tcttgctgcgcctccgcctcctcctctgctccgccaccggcttcctcctcctgagcagtcagcccgcgcgccggccggctccgttatggcgacccgcagccctggcgtcgtgattagtgatgatgaaccaggttatgaccttgatttattttgcatacctaatcattatgctgaggatttggaaagggtgtttattcctcatggactaattatggacaggactgaacgtcttgctcgagatgtgatgaaggagatgggaggccatcacattgtagccctctgtgtgctcaaggggggctataaattctttgctgacctgctggattacatcaaagcactgaatagaaatagtgatagatccattcctatgactgtagattttatcagactgaagagctattgtaatgaccagtcaacaggggacataaaagtaattggtggagatgatctctcaactttaactggaaagaatgtcttgattgtggaagatataattgacactggcaaaacaatgcagactttgctttccttggtcaggcagtataatccaaagatggtcaaggtcgcaagcttgctggtgaaaaggaccccacgaagtgttggatataagccagactttgttggatttgaaattccagacaagtttgttgtaggatatgcccttgactataatgaatacttcagggatttgaatcatgtttgtgtcattagtgaaactggaaaagcaaaatacaaagcctaagatgagagttcaagttgagtttggaaacatctggagtcctattgacatcgccagtaaaattatcaatgttctagttctgtggccatctgcttagtagagctttttgcatgtatcttctaagaattttatctgttttgtactttagaaatgtcagttgctgcattcctaaactgtttatttgcactatgagcctatagactatcagttccctttgggcggattgttgtttaacttgtaaatgaaaaaattctcttaaaccacagcactattgagtgaaacattgaactcatatctgtaagaaataaagagaagatatattagttttttaattggtattttaatttttatatatgcaggaaagaatagaagtgattgaatattgttaattataccaccgtgtgttagaaaagtaagaagcagtcaattttcacatcaaagacagcatctaagaagttttgttctgtcctggaattattttagtagtgtttcagtaatgttgactgtattttccaacttgttcaaattattaccagtgaatctttgtcagcagttcccttttaaatgcaaatcaataaattcccaaaaattt

SEQ ID NO: 1578 - DNA, 2650 bp, Homo sapiens
agggacagcccagaggaggcgtggccacgctgccggcggaagtggagccctccgcgagcgcgcgaggccgccggggcaggcggggaaaccggacagtaggggcggggccgggccggcgatggggatgcgggagcactacgcggagctgcacccgtgcccgccggaattggggatgcagagcagcggcagcgggtatggcaggcagccggcgggccggcctccagcgcaggtgcccgagaggcaggggctggcctgggatgcgcgcgcacctgccctcgccccgccccgcccgcacgaggggtggtggccgaggccccgccccgcacgcctcgcctgaggcgggtccgctcagcccaggcgcccgcccccgcccccgccgattaaatgggccggcggggctcagcccccggaaacggtcgtaacttcggggctgcgagcgcggagggcgacgacgacgaagcgcagacagcgtcatggcagagcaggtggccctgagccggacccaggtgtgcgggatcctgcgggaagagcttttccagggcgatgccttccatcagtcggatacacacatattcatcatcatgggtgcatcgggtgacctggccaagaagaagatctaccccaccatctggtggctgttccgggatggccttctgcccgaaaacaccttcatcgtgggctatgcccgttcccgcctcacagtggctgacatccgcaaacagagtgagcccttcttcaaggccaccccagaggagaagctcaagctggaggacttctttgcccgcaactcctatgtggctggccagtacgatgatgcagcctcctaccagcgcctcaacagccacatggatgccctccacctggggtcacaggccaaccgcctcttctacctggccttgcccccgaccgtctacgaggccgtcaccaagaacattcacgagtcctgcatgagccagataggctggaaccgcatcatcgtggagaagcccttcgggagggacctgcagagctctgaccggctgtccaaccacatctcctccctgttccgtgaggaccagatctaccgcatcgaccactacctgggcaaggagatggtgcagaacctcatggtgctgagatttgccaacaggatcttcggccccatctggaaccgggacaacatcgcctgcgttatcctcaccttcaaggagccctttggcactgagggtcgcgggggctatttcgatgaatttgggatcatccgggacgtgatgcagaaccacctactgcagatgctgtgtctggtggccatggagaagcccgcctccaccaactcagatgacgtccgtgatgagaaggtcaaggtgttgaaatgcatctcagaggtgcaggccaacaatgtggtcctgggccagtacgtggggaaccccgatggagagggcgaggccaccaaagggtacctggacgaccccacggtgccccgcgggtccaccaccgccacttttgcagccgtcgtcctctatgtggagaatgagaggtgggatggggtgcccttcatcctgcgctgcggcaaggccctgaacgagcgcaaggccgaggtgaggctgcagttccatgatgtggccggcgacatcttccaccagcagtgcaagcgcaacgagctggtgatccgcgtgcagcccaacgaggccgtgtacaccaagatgatgaccaagaagccgggcatgttcttcaaccccgaggagtcggagctggacctgacctacggcaacagatacaagaacgtgaagctccctgacgcctacgagcgcctcatcctggacgtcttctgcgggagccagatgcacttcgtgcgcagcgacgagctccgtgaggcctggcgtattttcaccccactgctgcaccagattgagctggagaagcccaagcccatcccctatatttatggcagccgaggccccacggaggcagacgagctgatgaagagagtgggtttccagtatgagggcacctacaagtgggtgaacccccacaagctctgagccctgggcacccacctccacccccgccacggccaccctccttcccgccgcccgaccccgagtcgggaggactccgggaccattgacctcagctgcacattcctggccccgggctctggccaccctggcccgcccctcgctgctgctactacccgagcccagctacattcctcagctgccaagcactcgagaccatcctggcccctccagaccctgcctgagcccaggagctgagtcacctcctccactcactccagcccaacagaaggaaggaggagggcgcccattcgtctgtcccagagcttattggccactgggtctcactcctgagtggggccagggtgggagggagggacaagggggaggaaaggggcgagcacccacgtgagagaatctgcctgtggccttgcccgccagcctcagtgccacttgacattccttgtcaccagcaacatctcgagccccctggatgtcccctgtcccaccaactctgcactccatggccaccccgtgccacccgtaggcagcctctctgctataagaaaagcagacgcagcagctgggacccctcccaacctcaatgccctgccattaaatccgcaaacagccaaaaaaaaaaaaaaaaaaaa

SEQ ID NO: 1579 - DNA, 541 bp, Homo sapiens
cttttcgatccgccatctgcggtggagccgccaccaaaatgcagattttcgtgaaaacccttacggggaagaccatcaccctcgaggttgaaccctcggatacgatagaaaatgtaaaggccaagatccaggataaggaaggaattcctcctgatcagcagagactgatctttgctggcaagcagctggaagatggacgtactttgtctgactacaatattcaaaaggagtctactcttcatcttgtgttgagacttcgtggtggtgctaagaaaaggaagaagaagtcttacaccactcccaagaagaataagcacaagagaaagaaggttaagctggctgtcctgaaatattataaggtggatgagaatggcaaaattagtcgccttcgtcgagagtgcccttctgatgaatgtggtgctggggtgtttatggcaagtcactttgacagacattattgtggcaaatgttgtctgacttactgtttcaacaaaccagaagacaagtaactgtatgagttaataaaagacatgaactaaca

SEQ ID NO: 1580 - DNA, 748 bp, Homo sapiens
gcagataatgggaggagccgggcccgagcgagctctttcctttcgctgctgcggccgcagccatgagtatgctcaggcttcagaagaggctcgcctctagtgtcctccgctgtggcaagaagaaggtctggttagaccccaatgagaccaatgaaatcgccaatgccaactcccgtcagcagatccggaagctcatcaaagatgggctgatcatccgcaagcctgtgacggtccattcccgggctcgatgccggaaaaacaccttggcccgccggaagggcaggcacatgggcataggtaagcggaagggtacagccaatgcccgaatgccagagaaggtcacatggatgaggagaatgaggattttgcgccggctgctcagaagataccgtgaatctaagaagatcgatcgccacatgtatcacagcctgtacctgaaggtgaaggggaatgtgttcaaaaacaagcggattctcatggaacacatccacaagctgaaggcagacaaggcccgcaagaagctcctggctgaccaggctgaggcccgcaggtctaagaccaaggaagcacgcaagcgccgtgaagagcgcctccaggccaagaaggaggagatcatcaagactttatccaaggaggaagagaccaagaaataaaacctcccactttgtctgtacatactggcctctgtgattacatagatcagccattaaaataaaacaagccttaatctgcaaaaaaaaaaaaaaaa

SEQ ID NO: 1581 - DNA, 1867 bp, Homo sapiens
ggttcgctgtggcgggcgcctgggccgccggctgtttaacttcgcttccgctggcccatagtgatctttgcagtgacccagcagcatcactgtttcttggcgtgtgaagataacccaaggaattgaggaagttgctgagaagagtgtgctggagatgctctaggaaaaaattgaatagtgagacgagttccagcgcaagggtttctggtttgccaagaagaaagtgaacatcatggatcagaacaacagcctgccaccttacgctcagggcttggcctcccctcagggtgccatgactcccggaatccctatctttagtccaatgatgccttatggcactggactgaccccacagcctattcagaacaccaatagtctgtctattttggaagagcaacaaaggcagcagcagcaacaacaacagcagcagcagcagcagcagcagcaacagcaacagcagcagcagcagcagcagcagcagcagcagcagcagcagcagcagcagcagcagcaacaggcagtggcagctgcagccgttcagcagtcaacgtcccagcaggcaacacagggaacctcaggccaggcaccacagctcttccactcacagactctcacaactgcacccttgccgggcaccactccactgtatccctcccccatgactcccatgacccccatcactcctgccacgccagcttcggagagttctgggattgtaccgcagctgcaaaatattgtatccacagtgaatcttggttgtaaacttgacctaaagaccattgcacttcgtgcccgaaacgccgaatataatcccaagcggtttgctgcggtaatcatgaggataagagagccacgaaccacggcactgattttcagttctgggaaaatggtgtgcacaggagccaagagtgaagaacagtccagactggcagcaagaaaatatgctagagttgtacagaagttgggttttccagctaagttcttggacttcaagattcagaatatggtggggagctgtgatgtgaagtttcctataaggttagaaggccttgtgctcacccaccaacaatttagtagttatgagccagagttatttcctggtttaatctacagaatgatcaaacccagaattgttctccttatttttgtttctggaaaagttgtattaacaggtgctaaagtcagagcagaaatttatgaagcatttgaaaacatctaccctattctaaagggattcaggaagacgacgtaatggctctcatgtacccttgcctcccccacccccttctttttttttttttaaacaaatcagtttgttttggtacctttaaatggtggtgttgtgagaagatggatgttgagttgcagggtgtggcaccaggtgatgcccttctgtaagtgcccaccgcgggatgccgggaaggggcattatttgtgcactgagaacaccgcgcagcgtgactgtgagttgctcataccgtgctgctatctgggcagcgctgcccatttatttatatgtagattttaaacactgctgttgacaagttggtttgagggagaaaactttaagtgttaaagccacctctataattgattggactttttaattttaatgtttttccccatgaaccacagtttttatatttctaccagaaaagtaaaaatcttttttaaaagtgttgtttttctaatttataactcctaggggttatttctgtgccagacacattccacctctccagtattgcaggacagaatatatgtgttaatgaaaatgaatggctgtacatatttttttctttcttcagagtactctgtacaataaatgcagtttataaaagtgttaaaaaaaaaaaaaaaaaaaaaa

SEQ ID NO: 1582 - DNA, 2201 bp, Homo sapiens
cgggatttgggtcgcggttcttgtttgtggatcgctgtgatcgtcacttgacaatgcagatcttcgtgaagactctgactggtaagaccatcaccctcgaggttgagcccagtgacaccatcgagaatgtcaaggcaaagatccaagataaggaaggcatccctcctgaccagcagaggctgatctttgctggaaaacagctggaagatgggcgcaccctgtctgactacaacatccagaaagagtccaccctgcacctggtgctccgtctcagaggtgggatgcaaatcttcgtgaagacactcactggcaagaccatcacccttgaggtggagcccagtgacaccatcgagaacgtcaaagcaaagatccaggacaaggaaggcattcctcctgaccagcagaggttgatctttgccggaaagcagctggaagatgggcgcaccctgtctgactacaacatccagaaagagtctaccctgcacctggtgctccgtctcagaggtgggatgcagatcttcgtgaagaccctgactggtaagaccatcaccctcgaggtggagcccagtgacaccatcgagaatgtcaaggcaaagatccaagataaggaaggcattcctcctgatcagcagaggttgatctttgccggaaaacagctggaagatggtcgtaccctgtctgactacaacatccagaaagagtccaccttgcacctggtactccgtctcagaggtgggatgcaaatcttcgtgaagacactcactggcaagaccatcacccttgaggtcgagcccagtgacactatcgagaacgtcaaagcaaagatccaagacaaggaaggcattcctcctgaccagcagaggttgatctttgccggaaagcagctggaagatgggcgcaccctgtctgactacaacatccagaaagagtctaccctgcacctggtgctccgtctcagaggtgggatgcagatcttcgtgaagaccctgactggtaagaccatcaccctcgaagtggagccgagtgacaccattgagaatgtcaaggcaaagatccaagacaaggaaggcatccctcctgaccagcagaggttgatctttgccggaaaacagctggaagatggtcgtaccctgtctgactacaacatccagaaagagtccaccttgcacctggtgctccgtctcagaggtgggatgcagatcttcgtgaagaccctgactggtaagaccatcactctcgaggtggagccgagtgacaccattgagaatgtcaaggcaaagatccaagacaaggaaggcatccctcctgatcagcagaggttgatctttgctgggaaacagctggaagatggacgcaccctgtctgactacaacatccagaaagagtccaccctgcacctggtgctccgtcttagaggtgggatgcagatcttcgtgaagaccctgactggtaagaccatcactctcgaagtggagccgagtgacaccattgagaatgtcaaggcaaagatccaagacaaggaaggcatccctcctgaccagcagaggttgatctttgctgggaaacagctggaagatggacgcaccctgtctgactacaacatccagaaagagtccaccctgcacctggtgctccgtcttagaggtgggatgcagatcttcgtgaagaccctgactggtaagaccatcactctcgaagtggagccgagtgacaccattgagaatgtcaaggcaaagatccaagacaaggaaggcatccctcctgaccagcagaggttgatctttgctgggaaacagctggaagatggacgcaccctgtctgactacaacatccagaaagagtccaccctgcacctggtgctccgtctcagaggtgggatgcagatcttcgtgaagaccctgactggtaagaccatcaccctcgaggtggagcccagtgacaccatcgagaatgtcaaggcaaagatccaagataaggaaggcatccctcctgatcagcagaggttgatctttgctgggaaacagctggaagatggacgcaccctgtctgactacaacatccagaaagagtccactctgcacttggtcctgcgcttgagggggggtgtctaagtttccccttttaaggtttcaacaaatttcattgcactttcctttcaataaagttgttgcattcccaaaaaaaaaaaaaaaaaaaaaaaa

SEQ ID NO: 1583 - DNA, 2277 bp, Homo sapiens
gactgcgcggcggcaacagcagacatgtcgggggtccggggcctgtcgcggctgctgagcgctcggcgcctggcgctggccaaggcgtggccaacagtgttgcaaacaggaacccgaggttttcacttcactgttgatgggaacaagagggcatctgctaaagtttcagattccatttctgctcagtatccagtagtggatcatgaatttgatgcagtggtggtaggcgctggaggggcaggcttgcgagctgcatttggcctttctgaggcagggtttaatacagcatgtgttaccaagctgtttcctaccaggtcacacactgttgcagcgcagggaggaatcaatgctgctctggggaacatggaggaggacaactggaggtggcatttctacgacaccgtgaagggctccgactggctgggggaccaggatgccatccactacatgacggagcaggcccccgccgccgtggtcgagctagaaaattatggcatgccgtttagcagaactgaagatgggaagatttatcagcgtgcatttggtggacagagcctcaagtttggaaagggcgggcaggcccatcggtgctgctgtgtggctgatcggactggccactcgctattgcacaccttatatggacggtctctgcgatatgataccagctattttgtggagtattttgccttggatctcctgatggagaacggggagtgccgtggtgtcatcgcactgtgcatagaggacgggtccatccatcgcataagagcaaagaacactgttgttgccacaggaggctacgggcgcacctacttcagctgcacgtctgcccacaccagcactggcgacggcacggccatgatcaccagggcaggccttccttgccaggacctagagtttgttcagttccaccccacaggcatatatggtgctggttgtctcattacggaaggatgtcgtggagagggaggcattctcattaacagtcaaggcgaaaggtttatggagcgatacgcccctgtcgcgaaggacctggcgtctagagatgtggtgtctcggtcgatgactctggagatccgagaaggaagaggctgtggccctgagaaagatcacgtctacctgcagctgcaccacctacctccagagcagctggccacgcgcctgcctggcatttcagagacagccatgatcttcgctggcgtggacgtcacgaaggagccgatccctgtcctccccaccgtgcattataacatgggcggcattcccaccaactacaaggggcaggtcctgaggcacgtgaatggccaggatcagattgtgcccggcctgtacgcctgtggggaggccgcctgtgcctcggtacatggtgccaaccgcctcggggcaaactcgctcttggacctggttgtctttggtcgggcatgtgccctgagcatcgaagagtcatgcaggcctggagataaagtccctccaattaaaccaaacgctggggaagaatctgtcatgaatcttgacaaattgagatttgctgatggaagcataagaacatcggaactgcgactcagcatgcagaagtcaatgcaaaatcatgctgccgtgttccgtgtgggaagcgtgttgcaagaaggttgtgggaaaatcagcaagctctatggagacctaaagcacctgaagacgttcgaccggggaatggtctggaacacagacctggtggagaccctggagctgcagaacctgatgctgtgtgcgctgcagaccatctacggagcagaggcgcggaaggagtcacggggcgcgcatgccagggaagactacaaggtgcggattgatgagtacgattactccaagcccatccaggggcaacagaagaagccctttgaggagcactggaggaagcacaccctgtcctttgtggacgttggcactgggaaggtcactctggaatatagacccgtaatcgacaaaactttgaacgaggctgactgtgccaccatcccgccagccattcgctcctactgatgagacaagatgtggtgatgacagaatcagcttttgtaattatgtataatagctcatgcatgtgtccatgtcataactgtcttcatacgcttctgcactctggggaagaaggagtacattgaagggagattggcacctagtggctgggagcttgccaggaacccagtggccagggagcgtggcacttacctttgtcccttgcttcattcttgtgagatgataaaactgggcacagctcttaaataaaatataaatgag

SEQ ID NO: 1584 - DNA, 27 bp, Artificial Sequence
  Synthetic oligonucleotide
ttctcatagtattccattgattgggta

SEQ ID NO: 1585 - DNA, 21 bp, Artificial Sequence
  Synthetic oligonucleotide
caccggtatggagaatagcga

SEQ ID NO: 1586 - DNA, 107 bp, Artificial Sequence
  Synthetic oligonucleotide
ttctcatagtattccattgattgggtataccaggttctgtttacttttacttggcagttgatagaataggtgtagtttatactttttcgctattctccataccggtg

SEQ ID NO: 1587 - DNA, 35 bp, Artificial Sequence
  Synthetic oligonucleotide
tcgaagtgtaatttaaatactataaatattccctt

SEQ ID NO: 1588 - DNA, 26 bp, Artificial Sequence
  Synthetic oligonucleotide
ggaaacatggactgaatattaacacg

SEQ ID NO: 1589 - DNA, 154 bp, Artificial Sequence
  Synthetic oligonucleotide
tcgaagtgtaatttaaatactataaatattcccttgttttaagtgtacaagtgaattatttttactaaatttacagatgtgctgcaatctaagtttcggaatacttataccactccagaaataatcctcgtgttaatattcagtccatgtttcc

SEQ ID NO: 1590 - DNA, 21 bp, Artificial Sequence
  Synthetic oligonucleotide
ggtcttcctggtccacaaggt

SEQ ID NO: 1591 - DNA, 29 bp, Artificial Sequence
  Synthetic oligonucleotide
gaatattaacacgaggattatttctggag

SEQ ID NO: 1592 - DNA, 110 bp, Artificial Sequence
  Synthetic oligonucleotide
ggtcttcctggtccacaaggtccaattggtcctcctggtgaaaaaatgtgctgcaatctaagtttcggaatacttataccactccagaaataatcctcgtgttaatattc
